United States Patent Application Publication US 2005/0221354 A1 - sequence listing, part 8

SEQ ID NO: 270714 - DNA, 25 bp, probe
tgactgctttgtagtgaactttcat

SEQ ID NO: 270715 - DNA, 25 bp, probe
tgactgctttgtagtgaactttcat

SEQ ID NO: 270716 - DNA, 25 bp, probe
tgactgtgtcattagtcctttgtct

SEQ ID NO: 270717 - DNA, 25 bp, probe
tgactggattccttcctataattcc

SEQ ID NO: 270718 - DNA, 25 bp, probe
tgaccgattcctttatatttgctcc

SEQ ID NO: 270719 - DNA, 25 bp, probe
tgaccagacttttcaatcacatttc

SEQ ID NO: 270720 - DNA, 25 bp, probe
tgagccagagctcactacacaggtt

SEQ ID NO: 270721 - DNA, 25 bp, probe
tgagcctgcagttacattgaattgt

SEQ ID NO: 270722 - DNA, 25 bp, probe
tgagccagcactttctttctgatga

SEQ ID NO: 270723 - DNA, 25 bp, probe
tgagccagcactttctttctgatga

SEQ ID NO: 270724 - DNA, 25 bp, probe
tgaccagcactgtttatggctgcta

SEQ ID NO: 270725 - DNA, 25 bp, probe
tgacatcagctctgttcatgagtgc

SEQ ID NO: 270726 - DNA, 25 bp, probe
tgacactggatggcttcatgatgta

SEQ ID NO: 270727 - DNA, 25 bp, probe
tgacgctgggcacgttgagtgaatc

SEQ ID NO: 270728 - DNA, 25 bp, probe
tgaccatgatgccctgtattggtcc

SEQ ID NO: 270729 - DNA, 25 bp, probe
tgaccaactgcacgctattgctgtg

SEQ ID NO: 270730 - DNA, 25 bp, probe
tgactagcagctggactgattttga

SEQ ID NO: 270731 - DNA, 25 bp, probe
tgactagcagctgcccagctgtcaa

SEQ ID NO: 270732 - DNA, 25 bp, probe
tgaccagcacaagccagattgaaaa

SEQ ID NO: 270733 - DNA, 25 bp, probe
tgaccagcagcggacaaataaaact

SEQ ID NO: 270734 - DNA, 25 bp, probe
tgactagccttaaaaaagcaacatg

SEQ ID NO: 270735 - DNA, 25 bp, probe
tgaaatcgttgaagcgagagaaaag

SEQ ID NO: 270736 - DNA, 25 bp, probe
tgaccacgccgaatccggaagaaga

SEQ ID NO: 270737 - DNA, 25 bp, probe
tgacctctcaccacacggaagtgga

SEQ ID NO: 270738 - DNA, 25 bp, probe
tgacctccccaggacagagcaaaaa

SEQ ID NO: 270739 - DNA, 25 bp, probe
tgagccggcccagcaagatgaaaca

SEQ ID NO: 270740 - DNA, 25 bp, probe
tgacctgtgccgagctctatgaaaa

SEQ ID NO: 270741 - DNA, 25 bp, probe
tgacctggccagagccaagaaacac

SEQ ID NO: 270742 - DNA, 25 bp, probe
tgacctcccagaaccatggaagcca

SEQ ID NO: 270743 - DNA, 25 bp, probe
tgacacctccaattttgatgaacca

SEQ ID NO: 270744 - DNA, 25 bp, probe
tgagccctcccatgacatggagacc

SEQ ID NO: 270745 - DNA, 25 bp, probe
tgagctgctcatcaaacaagcgaca

SEQ ID NO: 270746 - DNA, 25 bp, probe
tgacgctatgacacacagcgcgagc

SEQ ID NO: 270747 - DNA, 25 bp, probe
tgacctatgacaaaacgccgctgga

SEQ ID NO: 270748 - DNA, 25 bp, probe
tgacactatataaaccgcccttttt

SEQ ID NO: 270749 - DNA, 25 bp, probe
tgacccctaaagccgacatttattc

SEQ ID NO: 270750 - DNA, 25 bp, probe
tgacccgggaagtcaggccattttc

SEQ ID NO: 270751 - DNA, 25 bp, probe
tgacccgggaagtcaggccattttc

SEQ ID NO: 270752 - DNA, 25 bp, probe
tgaccaatgggatgaggtcactttt

SEQ ID NO: 270753 - DNA, 25 bp, probe
tgagcctttaatggacttatttctt

SEQ ID NO: 270754 - DNA, 25 bp, probe
tgaacctcttatgacggttttgtaa

SEQ ID NO: 270755 - DNA, 25 bp, probe
tgaccaattatagttcggctcttga

SEQ ID NO: 270756 - DNA, 25 bp, probe
tgaccaagaatattgcttggatttt

SEQ ID NO: 270757 - DNA, 25 bp, probe
tgaccacacaattcttgatgacttg

SEQ ID NO: 270758 - DNA, 25 bp, probe
tgaccacagacatgttattcttctg

SEQ ID NO: 270759 - DNA, 25 bp, probe
tgaccacagacatgttattcttctg

SEQ ID NO: 270760 - DNA, 25 bp, probe
tgaccacagacctttatagcagccc

SEQ ID NO: 270761 - DNA, 25 bp, probe
tgaccagggaccagcatgagcgacc

SEQ ID NO: 270762 - DNA, 25 bp, probe
tgaaagggatctacctggacaccgc

SEQ ID NO: 270763 - DNA, 25 bp, probe
tgaaagggatctacctggacaccgc

SEQ ID NO: 270764 - DNA, 25 bp, probe
tgaaatgacgttgccgattcaccag

SEQ ID NO: 270765 - DNA, 25 bp, probe
tgaactcaggtttccggctactgac

SEQ ID NO: 270766 - DNA, 25 bp, probe
tgaactcaggtttccggctactgac

SEQ ID NO: 270767 - DNA, 25 bp, probe
tgaaccaggagtcactgagccaatg

SEQ ID NO: 270768 - DNA, 25 bp, probe
tgaaccggcgaggacacacgcagag

SEQ ID NO: 270769 - DNA, 25 bp, probe
tgacccggccaagcaactgtatgaa

SEQ ID NO: 270770 - DNA, 25 bp, probe
tgacccggccaagcaactgtatgaa

SEQ ID NO: 270771 - DNA, 25 bp, probe
tgactccttcccatcaactgagaga

SEQ ID NO: 270772 - DNA, 25 bp, probe
tgactccttcccatcaactgagaga

SEQ ID NO: 270773 - DNA, 25 bp, probe
tgactgtctttcctatagactgtaa

SEQ ID NO: 270774 - DNA, 25 bp, probe
tgcaccacgtctgggggactggaat

SEQ ID NO: 270775 - DNA, 25 bp, probe
tgaatgacttcgggggccaggtact

SEQ ID NO: 270776 - DNA, 25 bp, probe
tgaatgacttcgggggccaggtact

SEQ ID NO: 270777 - DNA, 25 bp, probe
tgacatgtattgcgggcgctctaga

SEQ ID NO: 270778 - DNA, 25 bp, probe
tgacattgatggcgaggcggaggac

SEQ ID NO: 270779 - DNA, 25 bp, probe
tgacaacatgggcttctggtggatc

SEQ ID NO: 270780 - DNA, 25 bp, probe
tgaagacagcggatttcggcctggc

SEQ ID NO: 270781 - DNA, 25 bp, probe
tgaagacagcggatttcggcctggc

SEQ ID NO: 270782 - DNA, 25 bp, probe
tgaaatacgttgttggccggctggc

SEQ ID NO: 270783 - DNA, 25 bp, probe
tgaaatcacctatgtggcccttgtc

SEQ ID NO: 270784 - DNA, 25 bp, probe
tgaaatcacctatgtggcccttgtc

SEQ ID NO: 270785 - DNA, 25 bp, probe
tccaactgcctaaggccctttgtgt

SEQ ID NO: 270786 - DNA, 25 bp, probe
tccaactccatgcaaaatcctttgt

SEQ ID NO: 270787 - DNA, 25 bp, probe
tccagtactgcacaaattcctaagg

SEQ ID NO: 270788 - DNA, 25 bp, probe
tgctttcaccaagaatgtcctagga

SEQ ID NO: 270789 - DNA, 25 bp, probe
tgaattacctggggagtcacggaaa

SEQ ID NO: 270790 - DNA, 25 bp, probe
tgaattacctggggagtcacggaaa

SEQ ID NO: 270791 - DNA, 25 bp, probe
tgaatgtaagggggggatcgaaaag

SEQ ID NO: 270792 - DNA, 25 bp, probe
tgaagtaaggagagggactggaccc

SEQ ID NO: 270793 - DNA, 25 bp, probe
tgactttgaccgagggccatggacg

SEQ ID NO: 270794 - DNA, 25 bp, probe
tgactggaaccggggcggtggggtg

SEQ ID NO: 270795 - DNA, 25 bp, probe
tgactggaaccggggcggtggggtg

SEQ ID NO: 270796 - DNA, 25 bp, probe
tgactggaaccggggcggtggggtg

SEQ ID NO: 270797 - DNA, 25 bp, probe
tgaagaaacgggggaggtgtgggag

SEQ ID NO: 270798 - DNA, 25 bp, probe
tgaaaagggcggtagttggtggtgg

SEQ ID NO: 270799 - DNA, 25 bp, probe
tgaactaggggggatattgctgtcc

SEQ ID NO: 270800 - DNA, 25 bp, probe
tgacctatgctcctgggatacgcta

SEQ ID NO: 270801 - DNA, 25 bp, probe
tgacctatgctcctgggatacgcta

SEQ ID NO: 270802 - DNA, 25 bp, probe
tgaccttgcataggggtaggcctgc

SEQ ID NO: 270803 - DNA, 25 bp, probe
tgaccttgcataggggtaggcctgc

SEQ ID NO: 270804 - DNA, 25 bp, probe
tgagcctgatgaatgggggagacct

SEQ ID NO: 270805 - DNA, 25 bp, probe
tgagcctgatgaatgggggagacct

SEQ ID NO: 270806 - DNA, 25 bp, probe
tgacgctgatgtggagtggaaattt

SEQ ID NO: 270807 - DNA, 25 bp, probe
tgaccggctgcgcaaatggatgttc

SEQ ID NO: 270808 - DNA, 25 bp, probe
tgactgcagtgtatatgaatggagg

SEQ ID NO: 270809 - DNA, 25 bp, probe
tgactgaagtaataactgatgagat

SEQ ID NO: 270810 - DNA, 25 bp, probe
tgacgcaaaataccaccttggcgcc

SEQ ID NO: 270811 - DNA, 25 bp, probe
tgacccagaagacaccacaggctgg

SEQ ID NO: 270812 - DNA, 25 bp, probe
tgacctcgatagctaggccaagttt

SEQ ID NO: 270813 - DNA, 25 bp, probe
tgacctcgatagctaggccaagttt

SEQ ID NO: 270814 - DNA, 25 bp, probe
tgacctcgagagctgaggctctagc

SEQ ID NO: 270815 - DNA, 25 bp, probe
tgacagctccggcgggtggagactt

SEQ ID NO: 270816 - DNA, 25 bp, probe
tgacagcccacgcggagggctacac

SEQ ID NO: 270817 - DNA, 25 bp, probe
tgacgcccttcgagaaactgacaca

SEQ ID NO: 270818 - DNA, 25 bp, probe
tgacacctctgtgtttgaactggag

SEQ ID NO: 270819 - DNA, 25 bp, probe
tgacagttcgctcattccaactaat

SEQ ID NO: 270820 - DNA, 25 bp, probe
tgaattatagttctcaacaataatt

SEQ ID NO: 270821 - DNA, 25 bp, probe
tgaactgtgagttattaaacttttc

SEQ ID NO: 270822 - DNA, 25 bp, probe
tgaactttatttaaggacattcttt

SEQ ID NO: 270823 - DNA, 25 bp, probe
tgaacatttttacagtaactttgtt

SEQ ID NO: 270824 - DNA, 25 bp, probe
taccgtgtttgtcattaacgttcac

SEQ ID NO: 270825 - DNA, 25 bp, probe
tgacctgtttttggtccacttttgc

SEQ ID NO: 270826 - DNA, 25 bp, probe
tgacctgtttttggtccacttttgc

SEQ ID NO: 270827 - DNA, 25 bp, probe
tgaccactttcaactcttgagtttt

SEQ ID NO: 270828 - DNA, 25 bp, probe
tgactcatatatacttttttttttt

SEQ ID NO: 270829 - DNA, 25 bp, probe
tgactcacctgaaagtttttttggt

SEQ ID NO: 270830 - DNA, 25 bp, probe
tgaccacagtgaaagttttggctga

SEQ ID NO: 270831 - DNA, 25 bp, probe
tgactgcctgtatatgttttgtgaa

SEQ ID NO: 270832 - DNA, 25 bp, probe
tgacgcctttaatgtgggcagcata

SEQ ID NO: 270833 - DNA, 25 bp, probe
tgaccctcgttattgttacagctga

SEQ ID NO: 270834 - DNA, 25 bp, probe
tgacactgtgggaaatgttcaccta

SEQ ID NO: 270835 - DNA, 25 bp, probe
tgaccatgtaggaagagttctcctg

SEQ ID NO: 270836 - DNA, 25 bp, probe
tgaccttaggcaggacttctcttct

SEQ ID NO: 270837 - DNA, 25 bp, probe
tgacctgaaggagacgtaccgctgc

SEQ ID NO: 270838 - DNA, 25 bp, probe
tgacctacagggaactgggaagatg

SEQ ID NO: 270839 - DNA, 25 bp, probe
tgacacttaggcccctgggacaatg

SEQ ID NO: 270840 - DNA, 25 bp, probe
tgaacaaggcccccttggagaaggt

SEQ ID NO: 270841 - DNA, 25 bp, probe
tgaacaaggcccccttggagaaggt

SEQ ID NO: 270842 - DNA, 25 bp, probe
tgaacaaggcccccttggagaaggt

SEQ ID NO: 270843 - DNA, 25 bp, probe
tgaccacaggcagcaccctgtgtga

SEQ ID NO: 270844 - DNA, 25 bp, probe
tgaccaaggacatgacactggaagg

SEQ ID NO: 270845 - DNA, 25 bp, probe
tgactagagggagccaagaggatgg

SEQ ID NO: 270846 - DNA, 25 bp, probe
tgactcagcagcctgttaaagaagg

SEQ ID NO: 270847 - DNA, 25 bp, probe
tgaaaccctttctaagaagtttcag

SEQ ID NO: 270848 - DNA, 25 bp, probe
tgaaaccctttctaagaagtttcag

SEQ ID NO: 270849 - DNA, 25 bp, probe
tgacaaacttatcccaaaactttag

SEQ ID NO: 270850 - DNA, 25 bp, probe
tgaaaatgcattagggaaaacttaa

SEQ ID NO: 270851 - DNA, 25 bp, probe
tgaaagacattcaggatcaacttga

SEQ ID NO: 270852 - DNA, 25 bp, probe
tgacacaaatgactgggctaaatct

SEQ ID NO: 270853 - DNA, 25 bp, probe
tgacaccttgcaccatgatctgaaa

SEQ ID NO: 270854 - DNA, 25 bp, probe
tgacaccttgcaccatgatctgaaa

SEQ ID NO: 270855 - DNA, 25 bp, probe
tgaccagctgaagcgcatcatggaa

SEQ ID NO: 270856 - DNA, 25 bp, probe
tgaccagctgaagcgcatcatggaa

SEQ ID NO: 270857 - DNA, 25 bp, probe
tgaccgctatgtggccatctgccac

SEQ ID NO: 270858 - DNA, 25 bp, probe
tgaccactgcatggggatccaacca

SEQ ID NO: 270859 - DNA, 25 bp, probe
tgaccactatgcaacctaaagccat

SEQ ID NO: 270860 - DNA, 25 bp, probe
tgaccactgtcatcctagaaggctt

SEQ ID NO: 270861 - DNA, 25 bp, probe
tgaccactgctggaccaaggacgtg

SEQ ID NO: 270862 - DNA, 25 bp, probe
tgaccgttggcactaagccagatgg

SEQ ID NO: 270863 - DNA, 25 bp, probe
tgacctgcttggatctagacagcat

SEQ ID NO: 270864 - DNA, 25 bp, probe
tgacgctgtgggaactcatgactct

SEQ ID NO: 270865 - DNA, 25 bp, probe
tgacggtggggattgctgcacctcc

SEQ ID NO: 270866 - DNA, 25 bp, probe
tgacgcacaggcggaagctgcgggc

SEQ ID NO: 270867 - DNA, 25 bp, probe
tgacgcacaggcggaagctgcgggc

SEQ ID NO: 270868 - DNA, 25 bp, probe
tgaccagcatggggaagctcagggg

SEQ ID NO: 270869 - DNA, 25 bp, probe
tgaccatctcgggaagtgaggagag

SEQ ID NO: 270870 - DNA, 25 bp, probe
tgaccagccagggggctgagttgga

SEQ ID NO: 270871 - DNA, 25 bp, probe
tgaccatgcggtgttgcttgtgggc

SEQ ID NO: 270872 - DNA, 25 bp, probe
tgaccagtggctatggcctgtgcga

SEQ ID NO: 270873 - DNA, 25 bp, probe
tgactgtgaggtagctgccactgtg

SEQ ID NO: 270874 - DNA, 25 bp, probe
tgactggtgaggaagcagcctgcag

SEQ ID NO: 270875 - DNA, 25 bp, probe
tgactggtattaaagctgctatttg

SEQ ID NO: 270876 - DNA, 25 bp, probe
tgactttgtcaatcagtgccatgat

SEQ ID NO: 270877 - DNA, 25 bp, probe
tgactctggtcagagatacctggcc

SEQ ID NO: 270878 - DNA, 25 bp, probe
tgactgggtgcagcgtgaggcttca

SEQ ID NO: 270879 - DNA, 25 bp, probe
tgacatggtgtgtggggacattccc

SEQ ID NO: 270880 - DNA, 25 bp, probe
tgacattgcatttgggggggctccc

SEQ ID NO: 270881 - DNA, 25 bp, probe
tgacatcttgttcggaagtgcctcc

SEQ ID NO: 270882 - DNA, 25 bp, probe
tgaactatttcgaaagcccttctaa

SEQ ID NO: 270883 - DNA, 25 bp, probe
tgaactccttcgtcaacgacatctt

SEQ ID NO: 270884 - DNA, 25 bp, probe
tgacctcactttgatcaggcaccat

SEQ ID NO: 270885 - DNA, 25 bp, probe
tgacctctttccagcagtgattcat

SEQ ID NO: 270886 - DNA, 25 bp, probe
tgacctctttccagcagtgattcat

SEQ ID NO: 270887 - DNA, 25 bp, probe
tgacccagtaccagcatatgctctg

SEQ ID NO: 270888 - DNA, 25 bp, probe
tgacctcagtagcctcaaatcatgg

SEQ ID NO: 270889 - DNA, 25 bp, probe
tgacttcagatccccaaatcctggg

SEQ ID NO: 270890 - DNA, 25 bp, probe
tgactatgcaacagacaactgcctt

SEQ ID NO: 270891 - DNA, 25 bp, probe
tgacttcatgctctgataactgcct

SEQ ID NO: 270892 - DNA, 25 bp, probe
tgacttcatctcttcgaacttcagt

SEQ ID NO: 270893 - DNA, 25 bp, probe
tgacttcatctcttcgaacttcagt

SEQ ID NO: 270894 - DNA, 25 bp, probe
tgacaatttggacaactgtagttgc

SEQ ID NO: 270895 - DNA, 25 bp, probe
tgacctggggagaaagttgagtgtc

SEQ ID NO: 270896 - DNA, 25 bp, probe
tgactcagggggaccgttggtgtgc

SEQ ID NO: 270897 - DNA, 25 bp, probe
tgactcaggcctggggccaggggtg

SEQ ID NO: 270898 - DNA, 25 bp, probe
tgaaaggtgtggggtcagcgggggc

SEQ ID NO: 270899 - DNA, 25 bp, probe
tgaacggggagccggtgaacgggcg

SEQ ID NO: 270900 - DNA, 25 bp, probe
tgaacggggagccggtgaacgggcg

SEQ ID NO: 270901 - DNA, 25 bp, probe
tgaacaatgcctaccggggactggc

SEQ ID NO: 270902 - DNA, 25 bp, probe
tgaacaatgcctaccggggactggc

SEQ ID NO: 270903 - DNA, 25 bp, probe
tgaacaatgcctaccggggactggc

SEQ ID NO: 270904 - DNA, 25 bp, probe
tgaacactgcttctcgaatggagtc

SEQ ID NO: 270905 - DNA, 25 bp, probe
tgaaattctggcttgggatgctgat

SEQ ID NO: 270906 - DNA, 25 bp, probe
tgaaaactgcggtggaggaagtttt

SEQ ID NO: 270907 - DNA, 25 bp, probe
tgaagaactgccgtttgtggggttt

SEQ ID NO: 270908 - DNA, 25 bp, probe
tgaaagctggatcttttggggttta

SEQ ID NO: 270909 - DNA, 25 bp, probe
tgaaagtattagttttggtttattg

SEQ ID NO: 270910 - DNA, 25 bp, probe
tgaagagtttaactttgggcccaga

SEQ ID NO: 270911 - DNA, 25 bp, probe
tgaagagtttaactttgggcccaga

SEQ ID NO: 270912 - DNA, 25 bp, probe
tgaatgagaattgtttctggtaaca

SEQ ID NO: 270913 - DNA, 25 bp, probe
tgaatgagaattgtttctggtaaca

SEQ ID NO: 270914 - DNA, 25 bp, probe
tgaaagaaactcttatgctttaaca

SEQ ID NO: 270915 - DNA, 25 bp, probe
tgaacaacagcattcagttatttgc

SEQ ID NO: 270916 - DNA, 25 bp, probe
tgaaaacacagtttccacttccctg

SEQ ID NO: 270917 - DNA, 25 bp, probe
tgacaataagcgctacctcttcatc

SEQ ID NO: 270918 - DNA, 25 bp, probe
tgacggagcttgataccatcctgtt

SEQ ID NO: 270919 - DNA, 25 bp, probe
tgaaggacattggttgcctccctta

SEQ ID NO: 270920 - DNA, 25 bp, probe
tgacgcggcattgtcatgcactggc

SEQ ID NO: 270921 - DNA, 25 bp, probe
tgacgcggcattgtcatgcactggc

SEQ ID NO: 270922 - DNA, 25 bp, probe
tgacacggtgtggtccattggctac

SEQ ID NO: 270923 - DNA, 25 bp, probe
tgaccgttgtgaatttctgtctcaa

SEQ ID NO: 270924 - DNA, 25 bp, probe
tgaccttttgaattcatcttctgct

SEQ ID NO: 270925 - DNA, 25 bp, probe
tgaacatttaactagcctttttggt

SEQ ID NO: 270926 - DNA, 25 bp, probe
tgacaatgtaacaggtcttattgga

SEQ ID NO: 270927 - DNA, 25 bp, probe
tgaaacatatctcttatcttacgaa

SEQ ID NO: 270928 - DNA, 25 bp, probe
tgaacaagttcaattttgccaggaa

SEQ ID NO: 270929 - DNA, 25 bp, probe
tgacccagtcagagttgtgcacatg

SEQ ID NO: 270930 - DNA, 25 bp, probe
tgaccctgtatgagctgctgacgca

SEQ ID NO: 270931 - DNA, 25 bp, probe
tgacccagcttttgctcgagagcat

SEQ ID NO: 270932 - DNA, 25 bp, probe
tgacccagtgttggcagcacgagcc

SEQ ID NO: 270933 - DNA, 25 bp, probe
tgacctcgtttgagcctgaagcact

SEQ ID NO: 270934 - DNA, 25 bp, probe
tgaaccttttgtgttgtcagacttt

SEQ ID NO: 270935 - DNA, 25 bp, probe
tgaattgctgtttggtttttacctt

SEQ ID NO: 270936 - DNA, 25 bp, probe
tgacatacgatttgagtttactcca

SEQ ID NO: 270937 - DNA, 25 bp, probe
tgaaaagtatacgtttagtcccgat

SEQ ID NO: 270938 - DNA, 25 bp, probe
tgacaaaattacgtttatgtactaa

SEQ ID NO: 270939 - DNA, 25 bp, probe
tgacaagtaccaggctttgatggac

SEQ ID NO: 270940 - DNA, 25 bp, probe
tgacaaggacccgtgtcacatcgtg

SEQ ID NO: 270941 - DNA, 25 bp, probe
tgacaaggacgtgcagggctggggc

SEQ ID NO: 270942 - DNA, 25 bp, probe
tgaagaggatcttccgactgctggg

SEQ ID NO: 270943 - DNA, 25 bp, probe
tgaaattgactttcgagcccaggct

SEQ ID NO: 270944 - DNA, 25 bp, probe
tgaaattgactttcgagcccaggct

SEQ ID NO: 270945 - DNA, 25 bp, probe
tgaaaggttgtgcctaccactggct

SEQ ID NO: 270946 - DNA, 25 bp, probe
tgaacagctaccagttccacatcgt

SEQ ID NO: 270947 - DNA, 25 bp, probe
tgaacagctaccagttccacatcgt

SEQ ID NO: 270948 - DNA, 25 bp, probe
tgacctgcatcatcatttgcttcaa

SEQ ID NO: 270949 - DNA, 25 bp, probe
tgacctgcatcaagtcttctgatct

SEQ ID NO: 270950 - DNA, 25 bp, probe
tgaccgcacagcactatgtgacaga

SEQ ID NO: 270951 - DNA, 25 bp, probe
tgacccagcagctatctaagtcaca

SEQ ID NO: 270952 - DNA, 25 bp, probe
tgacccagcccagaatgaacacgct

SEQ ID NO: 270953 - DNA, 25 bp, probe
tgactccacctcgagaaccaaggat

SEQ ID NO: 270954 - DNA, 25 bp, probe
tgacaccctttatatcccagaatgg

SEQ ID NO: 270955 - DNA, 25 bp, probe
tgaccgtctttgaaagcgacaaatg

SEQ ID NO: 270956 - DNA, 25 bp, probe
tgaccgtctttgaaagcgacaaatg

SEQ ID NO: 270957 - DNA, 25 bp, probe
tgacaagttcttcacacgaggacag

SEQ ID NO: 270958 - DNA, 25 bp, probe
tgacaactttggtatcgtggaagga

SEQ ID NO: 270959 - DNA, 25 bp, probe
tgacagcagatgaggaattttgggg

SEQ ID NO: 270960 - DNA, 25 bp, probe
tgaaaatcggggactttgggatgtc

SEQ ID NO: 270961 - DNA, 25 bp, probe
tgaaaaacagtatattgggaagctc

SEQ ID NO: 270962 - DNA, 25 bp, probe
tgaaaaggtgtcttcactgggaccc

SEQ ID NO: 270963 - DNA, 25 bp, probe
tgcgaaaggttctctctgtacatcc

SEQ ID NO: 270964 - DNA, 25 bp, probe
tgcgaaaggttctctctgtacatcc

SEQ ID NO: 270965 - DNA, 25 bp, probe
tgaaacggactctgctttgacatcg

SEQ ID NO: 270966 - DNA, 25 bp, probe
tgaaactggacaacgtactactgga

SEQ ID NO: 270967 - DNA, 25 bp, probe
tgaaactggacaacgtactactgga

SEQ ID NO: 270968 - DNA, 25 bp, probe
tgaaactaaattctactcctttcct

SEQ ID NO: 270969 - DNA, 25 bp, probe
tgacttcatagatttccttcccatc

SEQ ID NO: 270970 - DNA, 25 bp, probe
tgactgccaataacattcttcgatc

SEQ ID NO: 270971 - DNA, 25 bp, probe
tgacccagatgcacagagctctgct

SEQ ID NO: 270972 - DNA, 25 bp, probe
tgacccagatgcacagagctctgct

SEQ ID NO: 270973 - DNA, 25 bp, probe
tgacctgagacaagatgctgtcatg

SEQ ID NO: 270974 - DNA, 25 bp, probe
tgacctgagagctctgtctgatatc

SEQ ID NO: 270975 - DNA, 25 bp, probe
tgaccgagctgcgcagcattatcct

SEQ ID NO: 270976 - DNA, 25 bp, probe
tgacggagcgcaacatttctccact

SEQ ID NO: 270977 - DNA, 25 bp, probe
tgacggagcgcaacatttctccact

SEQ ID NO: 270978 - DNA, 25 bp, probe
tgactggagctaaatcccaccagcc

SEQ ID NO: 270979 - DNA, 25 bp, probe
tgactggattagctaccatgtagga

SEQ ID NO: 270980 - DNA, 25 bp, probe
tgactgtggtgccgtacttggagga

SEQ ID NO: 270981 - DNA, 25 bp, probe
tgactttggcacgtcacgggatgga

SEQ ID NO: 270982 - DNA, 25 bp, probe
tgacgacggcctctcagaggaggag

SEQ ID NO: 270983 - DNA, 25 bp, probe
tgacgaggaccgtctcggtggtgaa

SEQ ID NO: 270984 - DNA, 25 bp, probe
tgacgaccaccacgttctgtgggac

SEQ ID NO: 270985 - DNA, 25 bp, probe
tgaccccatcacagtcatcgagggc

SEQ ID NO: 270986 - DNA, 25 bp, probe
tgacaccctacatgagctcggtgcc

SEQ ID NO: 270987 - DNA, 25 bp, probe
tgacatcagcggtcagggtggggcc

SEQ ID NO: 270988 - DNA, 25 bp, probe
tgactgacgagccgaggggtggccg

SEQ ID NO: 270989 - DNA, 25 bp, probe
tgacatgaccagccaagagaatttt

SEQ ID NO: 270990 - DNA, 25 bp, probe
tgacatgaccagccaagagaatttt

SEQ ID NO: 270991 - DNA, 25 bp, probe
tgactagccatctcaagcaagttta

SEQ ID NO: 270992 - DNA, 25 bp, probe
tgacaaccagcggtactattttaat

SEQ ID NO: 270993 - DNA, 25 bp, probe
tgaaaccagaggccctaaataagaa

SEQ ID NO: 270994 - DNA, 25 bp, probe
tgaattacgggacccaaatgtcaaa

SEQ ID NO: 270995 - DNA, 25 bp, probe
tgacagtgagtgggaacaaaattaa

SEQ ID NO: 270996 - DNA, 25 bp, probe
tgacagatgatgctgtcaagcaata

SEQ ID NO: 270997 - DNA, 25 bp, probe
tgacaacagcctcaagatcatcagc

SEQ ID NO: 270998 - DNA, 25 bp, probe
tgaaacacccgaggttcaatgaacc

SEQ ID NO: 270999 - DNA, 25 bp, probe
tgaaaaccaggggcttgcccaaggc

SEQ ID NO: 271000 - DNA, 25 bp, probe
tgaaaaacgaggccaatgaccccgc

SEQ ID NO: 271001 - DNA, 25 bp, probe
tgaagtcatactagcccaaccaaca

SEQ ID NO: 271002 - DNA, 25 bp, probe
tgaagtcatactagcccaaccaaca

SEQ ID NO: 271003 - DNA, 25 bp, probe
tgactgtcatcagtgtcctctacta

SEQ ID NO: 271004 - DNA, 25 bp, probe
tgactaaccttgtcctaatacgcta

SEQ ID NO: 271005 - DNA, 25 bp, probe
tgactaccagctggttcgaaaatta

SEQ ID NO: 271006 - DNA, 25 bp, probe
tgactaccagctggttcgaaaatta

SEQ ID NO: 271007 - DNA, 25 bp, probe
tgaaacagctgtctccgtaaatgga

SEQ ID NO: 271008 - DNA, 25 bp, probe
tgacccagatatctccgttatgcag

SEQ ID NO: 271009 - DNA, 25 bp, probe
tgacccagatatctccgttatgcag

SEQ ID NO: 271010 - DNA, 25 bp, probe
tgaaccaattccaggtgttggtaca

SEQ ID NO: 271011 - DNA, 25 bp, probe
tgaagcttatcccactgggttggga

SEQ ID NO: 271012 - DNA, 25 bp, probe
tgacatttcaagctctgttggtggg

SEQ ID NO: 271013 - DNA, 25 bp, probe
tgaatttgacctacttgctggggta

SEQ ID NO: 271014 - DNA, 25 bp, probe
tgcaaattacttacttctggcgggg

SEQ ID NO: 271015 - DNA, 25 bp, probe
tgcagcaattcactgtaaagctgga

SEQ ID NO: 271016 - DNA, 25 bp, probe
tgcatacttgcacatcaaatcgatg

SEQ ID NO: 271017 - DNA, 25 bp, probe
tgaactaagtgaatgtatctgcaga

SEQ ID NO: 271018 - DNA, 25 bp, probe
tgaatctgaatggaggaatcttggc

SEQ ID NO: 271019 - DNA, 25 bp, probe
tgaaataatgcggggtctgcggcat

SEQ ID NO: 271020 - DNA, 25 bp, probe
tgacacttagccgctgtctcgccgt

SEQ ID NO: 271021 - DNA, 25 bp, probe
tgaaattatccatctcttaccgaaa

SEQ ID NO: 271022 - DNA, 25 bp, probe
tgaagtatataccctttacccacca

SEQ ID NO: 271023 - DNA, 25 bp, probe
tgaaactaagccctctctaggctcc

SEQ ID NO: 271024 - DNA, 25 bp, probe
tgaaactaagccctctctaggctcc

SEQ ID NO: 271025 - DNA, 25 bp, probe
tgaagacggacccatatatccctac

SEQ ID NO: 271026 - DNA, 25 bp, probe
tgacagacggacttgttgaccacac

SEQ ID NO: 271027 - DNA, 25 bp, probe
tgacgttcttgcttttggcgcccac

SEQ ID NO: 271028 - DNA, 25 bp, probe
tgacgtgtggtcttttgggatcctg

SEQ ID NO: 271029 - DNA, 25 bp, probe
tgacgtgtggtcttttgggatcctg

SEQ ID NO: 271030 - DNA, 25 bp, probe
tgactttggatttgctcggcttttg

SEQ ID NO: 271031 - DNA, 25 bp, probe
tgactctgtggctttgccatcgttt

SEQ ID NO: 271032 - DNA, 25 bp, probe
tgacggttgcatttgccacttcatt

SEQ ID NO: 271033 - DNA, 25 bp, probe
tgactgcggatgtttacactgaatg

SEQ ID NO: 271034 - DNA, 25 bp, probe
tgactgcctcatgttccagcaaaag

SEQ ID NO: 271035 - DNA, 25 bp, probe
tgcacacctcagcatgagccaagac

SEQ ID NO: 271036 - DNA, 25 bp, probe
tgacacctactacctgaagaccgtc

SEQ ID NO: 271037 - DNA, 25 bp, probe
tgacacttacgacaatgacattgcg

SEQ ID NO: 271038 - DNA, 25 bp, probe
tgacactttcacttttgcagattgg

SEQ ID NO: 271039 - DNA, 25 bp, probe
tgacaagttccctcatgagagtgag

SEQ ID NO: 271040 - DNA, 25 bp, probe
tgacattttccctgccaaggagaat

SEQ ID NO: 271041 - DNA, 25 bp, probe
tgactctcaaacgttgctaccgaga

SEQ ID NO: 271042 - DNA, 25 bp, probe
tgacccaaatttagtcccagaaata

SEQ ID NO: 271043 - DNA, 25 bp, probe
tgacccaaatattcgtgacagcagg

SEQ ID NO: 271044 - DNA, 25 bp, probe
tgactccaaatctgggagcaggaga

SEQ ID NO: 271045 - DNA, 25 bp, probe
tgactccctatcccggagttcagaa

SEQ ID NO: 271046 - DNA, 25 bp, probe
tgaacctttcctagggctgtggagt

SEQ ID NO: 271047 - DNA, 25 bp, probe
tgaaccaaatcctagagccagctga

SEQ ID NO: 271048 - DNA, 25 bp, probe
tgaccctcactgagagcgacctgaa

SEQ ID NO: 271049 - DNA, 25 bp, probe
tgactccgaatgggactggctgctg

SEQ ID NO: 271050 - DNA, 25 bp, probe
tgactccgaatgggactggctgctg

SEQ ID NO: 271051 - DNA, 25 bp, probe
tgaaccgaagcgcaatgtggtggtc

SEQ ID NO: 271052 - DNA, 25 bp, probe
tgaactgtaatgaggagaaggcgtc

SEQ ID NO: 271053 - DNA, 25 bp, probe
tgaagctatagaacgttaagacctc

SEQ ID NO: 271054 - DNA, 25 bp, probe
tgaaagaaaacttaatcagacttcc

SEQ ID NO: 271055 - DNA, 25 bp, probe
tgaatagaaaatttcctcaagttaa

SEQ ID NO: 271056 - DNA, 25 bp, probe
tgaataaatacctctcccagtgtaa

SEQ ID NO: 271057 - DNA, 25 bp, probe
taacagtaagccacccgactgtgac

SEQ ID NO: 271058 - DNA, 25 bp, probe
tgaacttaagcctactacagactgt

SEQ ID NO: 271059 - DNA, 25 bp, probe
tgaacttttgtttgctgacgactcc

SEQ ID NO: 271060 - DNA, 25 bp, probe
tgaactcctagctgtggtcaggctg

SEQ ID NO: 271061 - DNA, 25 bp, probe
tgacactcgctactggctgtgttga

SEQ ID NO: 271062 - DNA, 25 bp, probe
tgacatgactgtctgtgttgcggac

SEQ ID NO: 271063 - DNA, 25 bp, probe
tgacatagtctgctctgggcggaag

SEQ ID NO: 271064 - DNA, 25 bp, probe
tgactacctgtctgatgggatgaac

SEQ ID NO: 271065 - DNA, 25 bp, probe
tgactacctgtctgatgggatgaac

SEQ ID NO: 271066 - DNA, 25 bp, probe
tgacaactctgtgctttggctgtca

SEQ ID NO: 271067 - DNA, 25 bp, probe
tgaaaccctgccattgaattgcatt

SEQ ID NO: 271068 - DNA, 25 bp, probe
tgaaaccctgccattgaattgcatt

SEQ ID NO: 271069 - DNA, 25 bp, probe
tgaaccacgtgttttgacatcatgt

SEQ ID NO: 271070 - DNA, 25 bp, probe
tgacatggacgtttgtgatgatcac

SEQ ID NO: 271071 - DNA, 25 bp, probe
tgacattgccctcgtggagatcacc

SEQ ID NO: 271072 - DNA, 25 bp, probe
tgactgacaaggctggccgcacagc

SEQ ID NO: 271073 - DNA, 25 bp, probe
tgacggcgacagtgacagcgacagc

SEQ ID NO: 271074 - DNA, 25 bp, probe
tgacggcgacagtgacagcgacagc

SEQ ID NO: 271075 - DNA, 25 bp, probe
tgacggtgatcttgggcagaacata

SEQ ID NO: 271076 - DNA, 25 bp, probe
tgactctatgagatggggaacaagc

SEQ ID NO: 271077 - DNA, 25 bp, probe
tgactcgagcaagggtgcgacccag

SEQ ID NO: 271078 - DNA, 25 bp, probe
tgacactggaagggtccggcttggc

SEQ ID NO: 271079 - DNA, 25 bp, probe
tgaaaggacaggctcctggccttgg

SEQ ID NO: 271080 - DNA, 25 bp, probe
tgaaagatacgacattgctgagcct

SEQ ID NO: 271081 - DNA, 25 bp, probe
tgcaatatgcattaaaatagctggc

SEQ ID NO: 271082 - DNA, 25 bp, probe
tgacttcttgaaggtatgcatgccc

SEQ ID NO: 271083 - DNA, 25 bp, probe
tgactttggcaggctatggcttcgc

SEQ ID NO: 271084 - DNA, 25 bp, probe
tgactttggcaggctatggcttcgc

SEQ ID NO: 271085 - DNA, 25 bp, probe
tgactttggcaggctatggcttcgc

SEQ ID NO: 271086 - DNA, 25 bp, probe
tgacttctacggcagcagtgtgagc

SEQ ID NO: 271087 - DNA, 25 bp, probe
tgactttgacagactccaggctggc

SEQ ID NO: 271088 - DNA, 25 bp, probe
tgactttgcgcaagcatcacagatg

SEQ ID NO: 271089 - DNA, 25 bp, probe
tgactttgcgcaagcatcacagatg

SEQ ID NO: 271090 - DNA, 25 bp, probe
tgactctcactgacgaccatgaatt

SEQ ID NO: 271091 - DNA, 25 bp, probe
tgactccaatgtcatccatcacttc

SEQ ID NO: 271092 - DNA, 25 bp, probe
tgactccaagctgcatggcaagttc

SEQ ID NO: 271093 - DNA, 25 bp, probe
tgactcccagatcagtcagagcccc

SEQ ID NO: 271094 - DNA, 25 bp, probe
tgacatccaaatctagccagagccc

SEQ ID NO: 271095 - DNA, 25 bp, probe
tgacatcaagacactccagtaccca

SEQ ID NO: 271096 - DNA, 25 bp, probe
tgacaagaaccatcaagttccaacc

SEQ ID NO: 271097 - DNA, 25 bp, probe
tgaaggaaccaacagtccacctcag

SEQ ID NO: 271098 - DNA, 25 bp, probe
tgaagtaaaagagggacccctgcgt

SEQ ID NO: 271099 - DNA, 25 bp, probe
tgaatgtgaaacgggggcaccccct

SEQ ID NO: 271100 - DNA, 25 bp, probe
tgaatgtgaaacgggggcaccccct

SEQ ID NO: 271101 - DNA, 25 bp, probe
tgaaatcaagacaggggccacccga

SEQ ID NO: 271102 - DNA, 25 bp, probe
tgaaatcaagacaggggccacccga

SEQ ID NO: 271103 - DNA, 25 bp, probe
tgaaattccacaacgtgtgcctgct

SEQ ID NO: 271104 - DNA, 25 bp, probe
tgaaattccacaacgtgtgcctgct

SEQ ID NO: 271105 - DNA, 25 bp, probe
tgaaattccacaacgtgtgcctgct

SEQ ID NO: 271106 - DNA, 25 bp, probe
tgaaaagccaacatgctgtcgctgc

SEQ ID NO: 271107 - DNA, 25 bp, probe
tgaaaaccaagtcctgtagtgcagt

SEQ ID NO: 271108 - DNA, 25 bp, probe
tgaaaaaagagcttgttaatgatga

SEQ ID NO: 271109 - DNA, 25 bp, probe
tgacaaagtcaacaggcaaggtaat

SEQ ID NO: 271110 - DNA, 25 bp, probe
tgaaaagatccagacccgggaaggg

SEQ ID NO: 271111 - DNA, 25 bp, probe
tgaaaacataacgacccaggccagg

SEQ ID NO: 271112 - DNA, 25 bp, probe
tgaaacactacagcacaagattgaa

SEQ ID NO: 271113 - DNA, 25 bp, probe
tgaagaatttcacacaacatacaag

SEQ ID NO: 271114 - DNA, 25 bp, probe
tgcagagaaacacggaaactaggaa

SEQ ID NO: 271115 - DNA, 25 bp, probe
tgaaaatactgaaaaacgaggccaa

SEQ ID NO: 271116 - DNA, 25 bp, probe
tgaaatatattcccccaaaggccaa

SEQ ID NO: 271117 - DNA, 25 bp, probe
tgaaattcttcatcctctaagtccc

SEQ ID NO: 271118 - DNA, 25 bp, probe
tgaaattcttcatcctctaagtccc

SEQ ID NO: 271119 - DNA, 25 bp, probe
tgacagcattgcttaagcccagaag

SEQ ID NO: 271120 - DNA, 25 bp, probe
tgaagcattacaggatgacagcagc

SEQ ID NO: 271121 - DNA, 25 bp, probe
tgacttatgacacttgcacagcatg

SEQ ID NO: 271122 - DNA, 25 bp, probe
tgacaacatgaccatggaagctgag

SEQ ID NO: 271123 - DNA, 25 bp, probe
tgacaccacgccagatcacagggca

SEQ ID NO: 271124 - DNA, 25 bp, probe
tgacaccacgccagatcacagggca

SEQ ID NO: 271125 - DNA, 25 bp, probe
tgacattctccccagaagcagaggc

SEQ ID NO: 271126 - DNA, 25 bp, probe
tgactttcgacccaacatgagcatc

SEQ ID NO: 271127 - DNA, 25 bp, probe
tgactttcgacccaacatgagcatc

SEQ ID NO: 271128 - DNA, 25 bp, probe
tgacttgttgacactgcgagcactc

SEQ ID NO: 271129 - DNA, 25 bp, probe
tgactggttgagcgggcaggccagc

SEQ ID NO: 271130 - DNA, 25 bp, probe
tgactggtttgactaccatggccac

SEQ ID NO: 271131 - DNA, 25 bp, probe
tgaaattgtgtactcccttgtactt

SEQ ID NO: 271132 - DNA, 25 bp, probe
tgcaatatggctaaaccctttcctg

SEQ ID NO: 271133 - DNA, 25 bp, probe
tgacagtgaattgacccatgttccc

SEQ ID NO: 271134 - DNA, 25 bp, probe
tgaatggatacagacctctttgggg

SEQ ID NO: 271135 - DNA, 25 bp, probe
tgaatggatacagacctctttgggg

SEQ ID NO: 271136 - DNA, 25 bp, probe
tgacatgggacacaagccacctgag

SEQ ID NO: 271137 - DNA, 25 bp, probe
tgacaggtggaccaacggactgatt

SEQ ID NO: 271138 - DNA, 25 bp, probe
tgacagggccgtcaccgaatatgtg

SEQ ID NO: 271139 - DNA, 25 bp, probe
tgaagggcgcgacccgcgaatatta

SEQ ID NO: 271140 - DNA, 25 bp, probe
tgaaaggcgctacattgagaacatt

SEQ ID NO: 271141 - DNA, 25 bp, probe
tgacaaggcgtctcttcaaacagtt

SEQ ID NO: 271142 - DNA, 25 bp, probe
tgaaaggcagtttataagcccgtta

SEQ ID NO: 271143 - DNA, 25 bp, probe
tgaaaaggttcttcatccctttcca

SEQ ID NO: 271144 - DNA, 25 bp, probe
tgaaaaggttcttcatccctttcca

SEQ ID NO: 271145 - DNA, 25 bp, probe
tgaaaacttgtttcaccctgaagaa

SEQ ID NO: 271146 - DNA, 25 bp, probe
tgaaaatccttctcactttgaatta

SEQ ID NO: 271147 - DNA, 25 bp, probe
tgaaaactccactatagttcatcaa

SEQ ID NO: 271148 - DNA, 25 bp, probe
tgaacaggtacctgagctacaccct

SEQ ID NO: 271149 - DNA, 25 bp, probe
tgaacgaggccagtggggaaccctt

SEQ ID NO: 271150 - DNA, 25 bp, probe
tgaactggccgctgggagaaaagcc

SEQ ID NO: 271151 - DNA, 25 bp, probe
tgaaaggcccttgggaatgaaggcg

SEQ ID NO: 271152 - DNA, 25 bp, probe
tgaaagccctgccttgtgaagtcag

SEQ ID NO: 271153 - DNA, 25 bp, probe
tgaaagcccctccgggaggcaggtt

SEQ ID NO: 271154 - DNA, 25 bp, probe
tgacagtggcatccccagggaaggg

SEQ ID NO: 271155 - DNA, 25 bp, probe
tgacagtggagatccatggcgtgag

SEQ ID NO: 271156 - DNA, 25 bp, probe
tgaagtggagaattgacagggtgat

SEQ ID NO: 271157 - DNA, 25 bp, probe
tgaagtggagaattgacagggtgat

SEQ ID NO: 271158 - DNA, 25 bp, probe
taatctggggtcggagggagtccct

SEQ ID NO: 271159 - DNA, 25 bp, probe
tccaggggttctggcgggagtctca

SEQ ID NO: 271160 - DNA, 25 bp, probe
tgaaggggatgtgctgggggtccag

SEQ ID NO: 271161 - DNA, 25 bp, probe
taagagaaatgagcttgacctttaa

SEQ ID NO: 271162 - DNA, 25 bp, probe
tgaagaaaggcaaatctgacttttt

SEQ ID NO: 271163 - DNA, 25 bp, probe
tgaaagcagaggggattttggatgt

SEQ ID NO: 271164 - DNA, 25 bp, probe
tgaaaaggtggatttgtggtgcatt

SEQ ID NO: 271165 - DNA, 25 bp, probe
tgaaaaggtgggactgaactcagta

SEQ ID NO: 271166 - DNA, 25 bp, probe
tgaaaaggtgggactgaactcagta

SEQ ID NO: 271167 - DNA, 25 bp, probe
tgacaaatactggggtgtcctcaag

SEQ ID NO: 271168 - DNA, 25 bp, probe
tgacacgattatgtgcgcgtcaaca

SEQ ID NO: 271169 - DNA, 25 bp, probe
tgacagcgtatgtgatgactgtgac

SEQ ID NO: 271170 - DNA, 25 bp, probe
tgacacagcttgtacagtctgattc

SEQ ID NO: 271171 - DNA, 25 bp, probe
tgactctctgtgccaagggctgtgc

SEQ ID NO: 271172 - DNA, 25 bp, probe
tgacacctggagcatgggcgtcatc

SEQ ID NO: 271173 - DNA, 25 bp, probe
tgacagcagtcggttggagcgagca

SEQ ID NO: 271174 - DNA, 25 bp, probe
tgacaacttcctgagatggcacagt

SEQ ID NO: 271175 - DNA, 25 bp, probe
tgacagttcatcttcaggtgtccag

SEQ ID NO: 271176 - DNA, 25 bp, probe
tgacagtttgacaggctgtacagga

SEQ ID NO: 271177 - DNA, 25 bp, probe
tgacagccgtggcggaggaagtgaa

SEQ ID NO: 271178 - DNA, 25 bp, probe
tgacactcgtgccggaggcaaaggt

SEQ ID NO: 271179 - DNA, 25 bp, probe
tgacacgacttgggggcaaaggagg

SEQ ID NO: 271180 - DNA, 25 bp, probe
tgaacgcagtcatccggaagggcgg

SEQ ID NO: 271181 - DNA, 25 bp, probe
tgaacagcgtcttgcctgtgatcat

SEQ ID NO: 271182 - DNA, 25 bp, probe
tgaaatcgcttgaccggtcttgttc

SEQ ID NO: 271183 - DNA, 25 bp, probe
tgaagtggctctacgggtttctgcc

SEQ ID NO: 271184 - DNA, 25 bp, probe
tgaagtggctctacgggtttctgcc

SEQ ID NO: 271185 - DNA, 25 bp, probe
tgacaggggctcaggatattcactc

SEQ ID NO: 271186 - DNA, 25 bp, probe
tgacaggaacctgggtgcttggctc

SEQ ID NO: 271187 - DNA, 25 bp, probe
tgaagactcactgggtggctttgcc

SEQ ID NO: 271188 - DNA, 25 bp, probe
tgacagtctcagtttgccagtcttg

SEQ ID NO: 271189 - DNA, 25 bp, probe
tgaagtctggcaactcggacgtgta

SEQ ID NO: 271190 - DNA, 25 bp, probe
tgaaatatgtctatatgctgaatat

SEQ ID NO: 271191 - DNA, 25 bp, probe
tgaaatatgtctatatgctgaatat

SEQ ID NO: 271192 - DNA, 25 bp, probe
tgaaatctgatcatatatttttacc

SEQ ID NO: 271193 - DNA, 25 bp, probe
tgaaatcttttatatctgttgccta

SEQ ID NO: 271194 - DNA, 25 bp, probe
tgaaatcttttatatctgttgccta

SEQ ID NO: 271195 - DNA, 25 bp, probe
tgaaacattttcagtgtcggtcaaa

SEQ ID NO: 271196 - DNA, 25 bp, probe
tgaaacattttcagtgtcggtcaaa

SEQ ID NO: 271197 - DNA, 25 bp, probe
tgaagtcactttatctgggtgtctc

SEQ ID NO: 271198 - DNA, 25 bp, probe
tgaagacagctacacctggtttcct

SEQ ID NO: 271199 - DNA, 25 bp, probe
tgaagaggggccctctgggttgcct

SEQ ID NO: 271200 - DNA, 25 bp, probe
tgaagggcgtcccatttatgtgctg

SEQ ID NO: 271201 - DNA, 25 bp, probe
tacttggttcccataatagcttcca

SEQ ID NO: 271202 - DNA, 25 bp, probe
tgacttctgcttccttgctaataca

SEQ ID NO: 271203 - DNA, 25 bp, probe
tgacttctgccttcatctgcagtaa

SEQ ID NO: 271204 - DNA, 25 bp, probe
tgactcctgaaactctgcagaaaca

SEQ ID NO: 271205 - DNA, 25 bp, probe
tgactcctgtgaagaatcagggtca

SEQ ID NO: 271206 - DNA, 25 bp, probe
tgactctagataacctcgggccgat

SEQ ID NO: 271207 - DNA, 25 bp, probe
tgactctagataacctcgggccgat

SEQ ID NO: 271208 - DNA, 25 bp, probe
tgacacgcatgatcctcatcgtggc

SEQ ID NO: 271209 - DNA, 25 bp, probe
tgacaagatgattcgcaagcctgat

SEQ ID NO: 271210 - DNA, 25 bp, probe
tgacagctgagcggctgagtcctga

SEQ ID NO: 271211 - DNA, 25 bp, probe
tgacagggtggcagtcccatagcct

SEQ ID NO: 271212 - DNA, 25 bp, probe
tgacaaggttccatctccagaatcc

SEQ ID NO: 271213 - DNA, 25 bp, probe
tgacaaggttccatctccagaatcc

SEQ ID NO: 271214 - DNA, 25 bp, probe
tgaaaaacttcactgcccagaagca

SEQ ID NO: 271215 - DNA, 25 bp, probe
tgaaagactgtgtaggcccagaagt

SEQ ID NO: 271216 - DNA, 25 bp, probe
tgaaaattgctttgatcgcgcatga

SEQ ID NO: 271217 - DNA, 25 bp, probe
tgaaaattgctttgatcgcgcatga

SEQ ID NO: 271218 - DNA, 25 bp, probe
tgaacaaggcatttgtagccatttt

SEQ ID NO: 271219 - DNA, 25 bp, probe
tgcaaaggtctgtgataccatattt

SEQ ID NO: 271220 - DNA, 25 bp, probe
tgcaacaagtcctgaatcccttgca

SEQ ID NO: 271221 - DNA, 25 bp, probe
taacatagaccaaatatcccccaat

SEQ ID NO: 271222 - DNA, 25 bp, probe
tgaacatcaacatgacttcccctat

SEQ ID NO: 271223 - DNA, 25 bp, probe
tgacatctcagcaactgacctggcc

SEQ ID NO: 271224 - DNA, 25 bp, probe
tgactacatttcaagctctccagca

SEQ ID NO: 271225 - DNA, 25 bp, probe
tgacacaatatgagcactgcccaga

SEQ ID NO: 271226 - DNA, 25 bp, probe
tgactcaacatgttactgaccagca

SEQ ID NO: 271227 - DNA, 25 bp, probe
tgcagctgcaacagtacttcctgcg

SEQ ID NO: 271228 - DNA, 25 bp, probe
tgcgcgattcaagaaatccatggtg

SEQ ID NO: 271229 - DNA, 25 bp, probe
tgcgggtagactacgaccaggtgaa

SEQ ID NO: 271230 - DNA, 25 bp, probe
tgccatgcgtaagatctaccgagga

SEQ ID NO: 271231 - DNA, 25 bp, probe
tgcccgcataaaactgaaggtggag

SEQ ID NO: 271232 - DNA, 25 bp, probe
tgacaccaaacaacattatgttggg

SEQ ID NO: 271233 - DNA, 25 bp, probe
tgaaacaccactcctttttgtgtgt

SEQ ID NO: 271234 - DNA, 25 bp, probe
tgaaacattcatttttaccttgtgg

SEQ ID NO: 271235 - DNA, 25 bp, probe
tgaaaattcatatgtccctcgtgag

SEQ ID NO: 271236 - DNA, 25 bp, probe
tgaattttatgatgccaccgtggag

SEQ ID NO: 271237 - DNA, 25 bp, probe
tgaatgttgatgatcccacgggagc

SEQ ID NO: 271238 - DNA, 25 bp, probe
tgacatttgtttggaatcgtgccac

SEQ ID NO: 271239 - DNA, 25 bp, probe
tgacagttgctaaagcagtcagtcc

SEQ ID NO: 271240 - DNA, 25 bp, probe
tgacactcgtgctcacatgtcagac

SEQ ID NO: 271241 - DNA, 25 bp, probe
tgacactcgtgctcacatgtcagac

SEQ ID NO: 271242 - DNA, 25 bp, probe
tgacactggtgatcgcatacatcat

SEQ ID NO: 271243 - DNA, 25 bp, probe
tgacttgtgtatctgcatcaacagc

SEQ ID NO: 271244 - DNA, 25 bp, probe
tgacttggtatatgctcatctgagt

SEQ ID NO: 271245 - DNA, 25 bp, probe
tgacttcgtagcagcacctactatg

SEQ ID NO: 271246 - DNA, 25 bp, probe
tgacttcagttgtgcccatgttata

SEQ ID NO: 271247 - DNA, 25 bp, probe
tgacattgcattagtctccctttca

SEQ ID NO: 271248 - DNA, 25 bp, probe
tgacaagatgtttctacctcttccc

SEQ ID NO: 271249 - DNA, 25 bp, probe
tgacaagatgtttctacctcttccc

SEQ ID NO: 271250 - DNA, 25 bp, probe
tgacaatgttttatcctgctggcca

SEQ ID NO: 271251 - DNA, 25 bp, probe
tgacacgttaatatccctagcagag

SEQ ID NO: 271252 - DNA, 25 bp, probe
tgaaggtcagggtcacccaagcaac

SEQ ID NO: 271253 - DNA, 25 bp, probe
tgaaggtcagaagtaatcctgagaa

SEQ ID NO: 271254 - DNA, 25 bp, probe
tgaacgtcgtgtgactcagtgcaga

SEQ ID NO: 271255 - DNA, 25 bp, probe
tgaactatcagggcaagctcatagc

SEQ ID NO: 271256 - DNA, 25 bp, probe
tgaactatcagggcaagctcatagc

SEQ ID NO: 271257 - DNA, 25 bp, probe
tgaacttcatggtcaacacaagcca

SEQ ID NO: 271258 - DNA, 25 bp, probe
tgaatgcacgtgcatccaacaaccc

SEQ ID NO: 271259 - DNA, 25 bp, probe
tgaatgcacgtgcatccaacaaccc

SEQ ID NO: 271260 - DNA, 25 bp, probe
tgaagaggctgtccagataaatccc

SEQ ID NO: 271261 - DNA, 25 bp, probe
tgaagcacctgaataggcaagtcga

SEQ ID NO: 271262 - DNA, 25 bp, probe
tgacatgcaacttaaggacttctca

SEQ ID NO: 271263 - DNA, 25 bp, probe
tgacatgctcctggcaactacttca

SEQ ID NO: 271264 - DNA, 25 bp, probe
tgacttccggaagaggcatgcaccc

SEQ ID NO: 271265 - DNA, 25 bp, probe
tgaattacgagcagaaagatccatc

SEQ ID NO: 271266 - DNA, 25 bp, probe
tgacatctaccagtccaaggaggcc

SEQ ID NO: 271267 - DNA, 25 bp, probe
tgacacagcctgtttcaaccaggcc

SEQ ID NO: 271268 - DNA, 25 bp, probe
tgacacgcatctttgcttacagtgc

SEQ ID NO: 271269 - DNA, 25 bp, probe
tgacatcgcttgttcctaagtgaaa

SEQ ID NO: 271270 - DNA, 25 bp, probe
tgacatctctagtacttcggatcaa

SEQ ID NO: 271271 - DNA, 25 bp, probe
tgacattgacatgatctgccgtgcc

SEQ ID NO: 271272 - DNA, 25 bp, probe
tgacattgagcagtatcagtttctc

SEQ ID NO: 271273 - DNA, 25 bp, probe
tgacagtgcttctacacatttcatc

SEQ ID NO: 271274 - DNA, 25 bp, probe
tgaaatgctccgtatgatttgcaca

SEQ ID NO: 271275 - DNA, 25 bp, probe
tgaaatctatcagatcatgctggac

SEQ ID NO: 271276 - DNA, 25 bp, probe
tgaaatcgaacagtcgctgaacggc

SEQ ID NO: 271277 - DNA, 25 bp, probe
tgacatcaagaaggtggtgaagcag

SEQ ID NO: 271278 - DNA, 25 bp, probe
tgacatcgagaacgctgagctcacc

SEQ ID NO: 271279 - DNA, 25 bp, probe
tgacagtggcgacgatgaacatgcc

SEQ ID NO: 271280 - DNA, 25 bp, probe
tgacagtgctcgctgagaactctca

SEQ ID NO: 271281 - DNA, 25 bp, probe
tgacattggagcctgggcatcctca

SEQ ID NO: 271282 - DNA, 25 bp, probe
tgacatctatgtgctaggctgcctc

SEQ ID NO: 271283 - DNA, 25 bp, probe
tgaactagcccttggctcattccag

SEQ ID NO: 271284 - DNA, 25 bp, probe
tgaagctgacccgaggtcttcctat

SEQ ID NO: 271285 - DNA, 25 bp, probe
tgaagctgacccgaggtcttcctat

SEQ ID NO: 271286 - DNA, 25 bp, probe
tgaaatgacccagtggactcctcca

SEQ ID NO: 271287 - DNA, 25 bp, probe
tgaaaggcccatggatcagctcttc

SEQ ID NO: 271288 - DNA, 25 bp, probe
tgaaaggcccatggatcagctcttc

SEQ ID NO: 271289 - DNA, 25 bp, probe
tgaactgggccattgatcagactaa

SEQ ID NO: 271290 - DNA, 25 bp, probe
tgaacagttggctgtatgactgaag

SEQ ID NO: 271291 - DNA, 25 bp, probe
tgaagcgaatcctgtgtcacgagca

SEQ ID NO: 271292 - DNA, 25 bp, probe
tgaaaaacacatccttcatcgagat

SEQ ID NO: 271293 - DNA, 25 bp, probe
tgaaaaacacatccttcatcgagat

SEQ ID NO: 271294 - DNA, 25 bp, probe
tgacaaacaactgccatctctgggc

SEQ ID NO: 271295 - DNA, 25 bp, probe
tgaacaacatcctggcctgcaggtg

SEQ ID NO: 271296 - DNA, 25 bp, probe
tgaaagcacacttcgggatgaccat

SEQ ID NO: 271297 - DNA, 25 bp, probe
tgaaagctcgccgggcggcaatctc

SEQ ID NO: 271298 - DNA, 25 bp, probe
tgaaagctcgccgggcggcaatctc

SEQ ID NO: 271299 - DNA, 25 bp, probe
tgaaagctcgccgggcggcaatctc

SEQ ID NO: 271300 - DNA, 25 bp, probe
tgaactgatctctgtatcccattat

SEQ ID NO: 271301 - DNA, 25 bp, probe
tgaactgatctctgtatcccattat

SEQ ID NO: 271302 - DNA, 25 bp, probe
tgaaagattcctttcctatccatcc

SEQ ID NO: 271303 - DNA, 25 bp, probe
tgaagaataccttctcacctacatc

SEQ ID NO: 271304 - DNA, 25 bp, probe
tgaaaaactccagtgtcccatcttt

SEQ ID NO: 271305 - DNA, 25 bp, probe
tgaagaaatgttctgtgcccaccgt

SEQ ID NO: 271306 - DNA, 25 bp, probe
tgaagaaattcgaatctcccaacat

SEQ ID NO: 271307 - DNA, 25 bp, probe
tgaaagagttcagacttatcaccat

SEQ ID NO: 271308 - DNA, 25 bp, probe
tgaaactgtatcacctttgccaagt

SEQ ID NO: 271309 - DNA, 25 bp, probe
tgaactggagtcattttctgaaagg

SEQ ID NO: 271310 - DNA, 25 bp, probe
tgaacccagtttcattctgcaggag

SEQ ID NO: 271311 - DNA, 25 bp, probe
tgaaccagatctacggtttcgaggg

SEQ ID NO: 271312 - DNA, 25 bp, probe
tgaactcagtgcactgtgtccaggg

SEQ ID NO: 271313 - DNA, 25 bp, probe
tgacaacgtgatgctggattccgag

SEQ ID NO: 271314 - DNA, 25 bp, probe
tgacaagcggatctctgtagacgaa

SEQ ID NO: 271315 - DNA, 25 bp, probe
tgacaaggcagacgtcgtacccagc

SEQ ID NO: 271316 - DNA, 25 bp, probe
tgaaagccagcagcacgaactgccc

SEQ ID NO: 271317 - DNA, 25 bp, probe
tgacaagactgtccctgaatttcca

SEQ ID NO: 271318 - DNA, 25 bp, probe
tgacaagactgtccctgaatttcca

SEQ ID NO: 271319 - DNA, 25 bp, probe
tgaaaatcttgcgttgtatgttgaa

SEQ ID NO: 271320 - DNA, 25 bp, probe
tgaacaacactgctggtttgagacc

SEQ ID NO: 271321 - DNA, 25 bp, probe
tgaacaacactgctggtttgagacc

SEQ ID NO: 271322 - DNA, 25 bp, probe
tgaaaagcctttctgttgcaactat

SEQ ID NO: 271323 - DNA, 25 bp, probe
tgaaaagcctttctgttgcaactat

SEQ ID NO: 271324 - DNA, 25 bp, probe
tgaaaaaccattttgctgtcccttt

SEQ ID NO: 271325 - DNA, 25 bp, probe
tgaaacacccatgctatctgttcct

SEQ ID NO: 271326 - DNA, 25 bp, probe
tgaagatgccccgttattgtctttt

SEQ ID NO: 271327 - DNA, 25 bp, probe
tgaagatgccccgttattgtctttt

SEQ ID NO: 271328 - DNA, 25 bp, probe
tgaagatgccccgttattgtctttt

SEQ ID NO: 271329 - DNA, 25 bp, probe
tgaagactctagacgtttactttgt

SEQ ID NO: 271330 - DNA, 25 bp, probe
tgaaactcggctgtattaatcacgc

SEQ ID NO: 271331 - DNA, 25 bp, probe
tgaagcatccagtctttcgtactac

SEQ ID NO: 271332 - DNA, 25 bp, probe
tgaacagaagatccacagtccaagt

SEQ ID NO: 271333 - DNA, 25 bp, probe
tgaaatgaacattgaagcccctgtc

SEQ ID NO: 271334 - DNA, 25 bp, probe
tgcaaagtagttcagctccttcttc

SEQ ID NO: 271335 - DNA, 25 bp, probe
tgcgatggaaggtggcctttctccc

SEQ ID NO: 271336 - DNA, 25 bp, probe
tctggcgacagttttccttctcatc

SEQ ID NO: 271337 - DNA, 25 bp, probe
tgcattgcagaaggtgttcctttct

SEQ ID NO: 271338 - DNA, 25 bp, probe
tgcattgcagaaggtgttcctttct

SEQ ID NO: 271339 - DNA, 25 bp, probe
tgacatgccagaggtcttctcttcc

SEQ ID NO: 271340 - DNA, 25 bp, probe
tgacatgccagaggtcttctcttcc

SEQ ID NO: 271341 - DNA, 25 bp, probe
tgacatcacaaggtgctggcactta

SEQ ID NO: 271342 - DNA, 25 bp, probe
tgaacactactgcctgtagtctgat

SEQ ID NO: 271343 - DNA, 25 bp, probe
tgaacagccctgagctggctgctgc

SEQ ID NO: 271344 - DNA, 25 bp, probe
tgaagcagcccgaagactgcctggt

SEQ ID NO: 271345 - DNA, 25 bp, probe
tgacaggacctggaatgtactggct

SEQ ID NO: 271346 - DNA, 25 bp, probe
tgacaggacctggaatgtactggct

SEQ ID NO: 271347 - DNA, 25 bp, probe
tgacagggtctgggtgtgcctggga

SEQ ID NO: 271348 - DNA, 25 bp, probe
tgacagactttggtctgtcccgcca

SEQ ID NO: 271349 - DNA, 25 bp, probe
tgacagactttggtctgtcccgcca

SEQ ID NO: 271350 - DNA, 25 bp, probe
tgaatgtgtggggtttcccctcagg

SEQ ID NO: 271351 - DNA, 25 bp, probe
tgaatgatagactctttcaccctgc

SEQ ID NO: 271352 - DNA, 25 bp, probe
tgacagtaagtactttctctctctg

SEQ ID NO: 271353 - DNA, 25 bp, probe
tgaagtgacagattaagagttcttg

SEQ ID NO: 271354 - DNA, 25 bp, probe
tgaagtgacagattaagagttcttg

SEQ ID NO: 271355 - DNA, 25 bp, probe
tgaagtcaacatgaagtttcctact

SEQ ID NO: 271356 - DNA, 25 bp, probe
tgaagagtactttatgtttcctgag

SEQ ID NO: 271357 - DNA, 25 bp, probe
tgaaggatttctccaaactcctggc

SEQ ID NO: 271358 - DNA, 25 bp, probe
tgaagcgtttcccagaacttctctg

SEQ ID NO: 271359 - DNA, 25 bp, probe
tgaacgactacccagaagtgttctg

SEQ ID NO: 271360 - DNA, 25 bp, probe
tgaatgtgagcttaccagggtcttt

SEQ ID NO: 271361 - DNA, 25 bp, probe
tgaatgtgagcttaccagggtcttt

SEQ ID NO: 271362 - DNA, 25 bp, probe
tgcagcagagagcggccagtagctt

SEQ ID NO: 271363 - DNA, 25 bp, probe
tgacagagggaggcctgcttgcttc

SEQ ID NO: 271364 - DNA, 25 bp, probe
tgacagagttcatgttgtgtgctgg

SEQ ID NO: 271365 - DNA, 25 bp, probe
tgacatgtggtgagttgtgtgtgga

SEQ ID NO: 271366 - DNA, 25 bp, probe
tgacagctgttgtcctttggggatc

SEQ ID NO: 271367 - DNA, 25 bp, probe
tgaagctggtggactttggcatggc

SEQ ID NO: 271368 - DNA, 25 bp, probe
tgaagctgaccgtctttgaaagcga

SEQ ID NO: 271369 - DNA, 25 bp, probe
tgaaggacttcacctacagcaagga

SEQ ID NO: 271370 - DNA, 25 bp, probe
tgacaagcacttactccaaaatgag

SEQ ID NO: 271371 - DNA, 25 bp, probe
tgacacatgcctcttccaggtaggc

SEQ ID NO: 271372 - DNA, 25 bp, probe
tgacacatgcctcttccaggtaggc

SEQ ID NO: 271373 - DNA, 25 bp, probe
tgaaatgcccacatccaggaagtcc

SEQ ID NO: 271374 - DNA, 25 bp, probe
tgaacaacatgcattccgagaagct

SEQ ID NO: 271375 - DNA, 25 bp, probe
tgaaccagacgtaccgagaggagta

SEQ ID NO: 271376 - DNA, 25 bp, probe
tgaagccacacagcccagaaggcca

SEQ ID NO: 271377 - DNA, 25 bp, probe
tgaaacaccacaacaagtattccag

SEQ ID NO: 271378 - DNA, 25 bp, probe
tgaaaagtcaagccatggaattcca

SEQ ID NO: 271379 - DNA, 25 bp, probe
tgaaaagccagctcttgaacctctt

SEQ ID NO: 271380 - DNA, 25 bp, probe
tgaagtatccagttcttagtcctta

SEQ ID NO: 271381 - DNA, 25 bp, probe
tgaaacttcaagtattattgcctta

SEQ ID NO: 271382 - DNA, 25 bp, probe
tgaaacatccacacattgtagagtt

SEQ ID NO: 271383 - DNA, 25 bp, probe
tgaagacattcaaaacgtgatgttt

SEQ ID NO: 271384 - DNA, 25 bp, probe
tgaagtcaacaataatggcagtaac

SEQ ID NO: 271385 - DNA, 25 bp, probe
tgaagtgaacaatactttgtaattt

SEQ ID NO: 271386 - DNA, 25 bp, probe
tgaactgagaaccccttttaattga

SEQ ID NO: 271387 - DNA, 25 bp, probe
tgaactgagaaccccttttaattga

SEQ ID NO: 271388 - DNA, 25 bp, probe
tgcaaagagaaaccgcttttggttt

SEQ ID NO: 271389 - DNA, 25 bp, probe
tgcaaacaacgttcgttctattttt

SEQ ID NO: 271390 - DNA, 25 bp, probe
tgaaaatcctattggttcctttatt

SEQ ID NO: 271391 - DNA, 25 bp, probe
tgaacaactgtttgtctttttttgt

SEQ ID NO: 271392 - DNA, 25 bp, probe
tgacaactcttcccgttttatttat

SEQ ID NO: 271393 - DNA, 25 bp, probe
tgacaactcttcccgttttatttat

SEQ ID NO: 271394 - DNA, 25 bp, probe
tccaactattagcccttttgttctc

SEQ ID NO: 271395 - DNA, 25 bp, probe
tcgaactttgggctactctgtttaa

SEQ ID NO: 271396 - DNA, 25 bp, probe
tgcaagactctcaaggagtactttc

SEQ ID NO: 271397 - DNA, 25 bp, probe
tgacaactgcactgaatgacacttt

SEQ ID NO: 271398 - DNA, 25 bp, probe
tgacacacagcactctctaaatctt

SEQ ID NO: 271399 - DNA, 25 bp, probe
tgacacacagcactctctaaatctt

SEQ ID NO: 271400 - DNA, 25 bp, probe
tgacacatacagacctcaagcctga

SEQ ID NO: 271401 - DNA, 25 bp, probe
tgaaatgtcagttctctagcataat

SEQ ID NO: 271402 - DNA, 25 bp, probe
tgaacagctcaggaactcagaaacc

SEQ ID NO: 271403 - DNA, 25 bp, probe
tgaactgctgagaggccggagaccg

SEQ ID NO: 271404 - DNA, 25 bp, probe
tgaactcgatgatgaccgtggaccc

SEQ ID NO: 271405 - DNA, 25 bp, probe
tgaaatcgtaaagcgagctgacgct

SEQ ID NO: 271406 - DNA, 25 bp, probe
tgaagccgtagaagggcgcccagca

SEQ ID NO: 271407 - DNA, 25 bp, probe
tgaagacgagagtgaccgcgctggc

SEQ ID NO: 271408 - DNA, 25 bp, probe
tgaagcagaagacacagccactgtg

SEQ ID NO: 271409 - DNA, 25 bp, probe
tgaagcagaagacacagccactgtg

SEQ ID NO: 271410 - DNA, 25 bp, probe
tgaagcaaacacacagactctgtga

SEQ ID NO: 271411 - DNA, 25 bp, probe
tgaatgaaactggagaagttgtcaa

SEQ ID NO: 271412 - DNA, 25 bp, probe
tgaagaaactgcaaccaacagtaag

SEQ ID NO: 271413 - DNA, 25 bp, probe
tgaagaacgtgcagacccaggagac

SEQ ID NO: 271414 - DNA, 25 bp, probe
tgaaatcatcggagtcagccaggag

SEQ ID NO: 271415 - DNA, 25 bp, probe
tgacaacatgcgaccgtgaccagga

SEQ ID NO: 271416 - DNA, 25 bp, probe
tgacaagctcgtgaggctctacgct

SEQ ID NO: 271417 - DNA, 25 bp, probe
tgacaagctcgtgaggctctacgct

SEQ ID NO: 271418 - DNA, 25 bp, probe
tgacaaatgctagaggctgctcccc

SEQ ID NO: 271419 - DNA, 25 bp, probe
tgacaaatgctagaggctgctcccc

SEQ ID NO: 271420 - DNA, 25 bp, probe
tgacaatcatgttgcagcaattcac

SEQ ID NO: 271421 - DNA, 25 bp, probe
tgacagagagcttcagcttctcctc

SEQ ID NO: 271422 - DNA, 25 bp, probe
tgaagaagcttacatccactttgcc

SEQ ID NO: 271423 - DNA, 25 bp, probe
tgaagaagcttacatccactttgcc

SEQ ID NO: 271424 - DNA, 25 bp, probe
tgaaatagttggtatccctttacta

SEQ ID NO: 271425 - DNA, 25 bp, probe
tgaaaagtctagaactcctgtaagt

SEQ ID NO: 271426 - DNA, 25 bp, probe
tgcaaaacttaaaattcctagaggg

SEQ ID NO: 271427 - DNA, 25 bp, probe
tgaaaacttcaaagaagcttcgaga

SEQ ID NO: 271428 - DNA, 25 bp, probe
tgaaaagcttaatgggctggccagg

SEQ ID NO: 271429 - DNA, 25 bp, probe
tgaacacagttttcaggactctggc

SEQ ID NO: 271430 - DNA, 25 bp, probe
tgaagaatttgcagggagcctccct

SEQ ID NO: 271431 - DNA, 25 bp, probe
tgaaaagtcagtgacggcctgcccg

SEQ ID NO: 271432 - DNA, 25 bp, probe
tgaaaagtcagtgacggcctgcccg

SEQ ID NO: 271433 - DNA, 25 bp, probe
tgaaaagtagtggggccccctgctg

SEQ ID NO: 271434 - DNA, 25 bp, probe
tgaagaagtacggggctaccactgt

SEQ ID NO: 271435 - DNA, 25 bp, probe
tgaataagaacctggtcatgcttta

SEQ ID NO: 271436 - DNA, 25 bp, probe
tgaataagaacctggtcatgcttta

SEQ ID NO: 271437 - DNA, 25 bp, probe
tgaaaaaaatgccacgtctgtttaa

SEQ ID NO: 271438 - DNA, 25 bp, probe
tgacaaaatttcccgcatcatcttt

SEQ ID NO: 271439 - DNA, 25 bp, probe
tgacaatgactattccctgacagtt

SEQ ID NO: 271440 - DNA, 25 bp, probe
tgacacagtgctcgaccttgatagc

SEQ ID NO: 271441 - DNA, 25 bp, probe
tgacacagtgctcgaccttgatagc

SEQ ID NO: 271442 - DNA, 25 bp, probe
tgaattagctggtacctgaagcccc

SEQ ID NO: 271443 - DNA, 25 bp, probe
tgaaatggtggaaggtgaaccccct

SEQ ID NO: 271444 - DNA, 25 bp, probe
taacggtcagagtgaagaccccccg

SEQ ID NO: 271445 - DNA, 25 bp, probe
tgaaggagtcggtgagggcctgcct

SEQ ID NO: 271446 - DNA, 25 bp, probe
tgaaggagtcggtgagggcctgcct

SEQ ID NO: 271447 - DNA, 25 bp, probe
tgaagtgagatacaaagctgggttt

SEQ ID NO: 271448 - DNA, 25 bp, probe
tgaagaaagcaaggaacctggtgtt

SEQ ID NO: 271449 - DNA, 25 bp, probe
tgaaaaagaaagtcggcgtctgttc

SEQ ID NO: 271450 - DNA, 25 bp, probe
tgaaaacaagggatggctcattgtt

SEQ ID NO: 271451 - DNA, 25 bp, probe
tgacacccaagggtcgcctattttt

SEQ ID NO: 271452 - DNA, 25 bp, probe
tgaatcctaagggctggtctctgct

SEQ ID NO: 271453 - DNA, 25 bp, probe
tgaacccaggaggcggagcttgcag

SEQ ID NO: 271454 - DNA, 25 bp, probe
tgaaaccagggccggagttagagag

SEQ ID NO: 271455 - DNA, 25 bp, probe
tgaagcccactccggaaactaaagt

SEQ ID NO: 271456 - DNA, 25 bp, probe
tgaagccctcccaggtgttaacatt

SEQ ID NO: 271457 - DNA, 25 bp, probe
tgaagccctcccaggtgttaacatt

SEQ ID NO: 271458 - DNA, 25 bp, probe
tgaacgccttcggtcaattaaagat

SEQ ID NO: 271459 - DNA, 25 bp, probe
tgaacgccttcggtcaattaaagat

SEQ ID NO: 271460 - DNA, 25 bp, probe
tgaacgctttaggctactggaaacc

SEQ ID NO: 271461 - DNA, 25 bp, probe
tgaactcttttgggcctggagcccc

SEQ ID NO: 271462 - DNA, 25 bp, probe
tgaacgtgtttggacctaatggtac

SEQ ID NO: 271463 - DNA, 25 bp, probe
tgaacgttttctaactgcctcgtag

SEQ ID NO: 271464 - DNA, 25 bp, probe
tgaacgttttctaactgcctcgtag

SEQ ID NO: 271465 - DNA, 25 bp, probe
tgacaaggtgttctttgcctctgtt

SEQ ID NO: 271466 - DNA, 25 bp, probe
tgacaagttcttttttttctgttgg

SEQ ID NO: 271467 - DNA, 25 bp, probe
tgacaagctctggttgcttattttt

SEQ ID NO: 271468 - DNA, 25 bp, probe
tgaacatgccgttggttttattggc

SEQ ID NO: 271469 - DNA, 25 bp, probe
tgaagatggcgatgtgatttgtttg

SEQ ID NO: 271470 - DNA, 25 bp, probe
tgaacttctgaaggcatgagtgttt

SEQ ID NO: 271471 - DNA, 25 bp, probe
tgaacttcatgaaggggtgtctgaa

SEQ ID NO: 271472 - DNA, 25 bp, probe
tgaaatgtcagcatgtgctgtgttc

SEQ ID NO: 271473 - DNA, 25 bp, probe
tgaagatgtcaagatggctttcgac

SEQ ID NO: 271474 - DNA, 25 bp, probe
tgaagatgtcaagatggctttcgac

SEQ ID NO: 271475 - DNA, 25 bp, probe
tgaaatggccaccaagctctatcgc

SEQ ID NO: 271476 - DNA, 25 bp, probe
tgaaatggccaccaagctctatcgc

SEQ ID NO: 271477 - DNA, 25 bp, probe
tgaatttccagacacctgggccaga

SEQ ID NO: 271478 - DNA, 25 bp, probe
tgaaattcgtgagtcacctggaggc

SEQ ID NO: 271479 - DNA, 25 bp, probe
tgacaaggagggtcacctggtgtgc

SEQ ID NO: 271480 - DNA, 25 bp, probe
tgaagcactgggcaacctggttgaa

SEQ ID NO: 271481 - DNA, 25 bp, probe
tgaagcactgggcaacctggttgaa

SEQ ID NO: 271482 - DNA, 25 bp, probe
tgaagcactgggcaacctggttgaa

SEQ ID NO: 271483 - DNA, 25 bp, probe
tgaagcactgggcaacctggttgaa

SEQ ID NO: 271484 - DNA, 25 bp, probe
tgaatcctggggttgactgtgtcca

SEQ ID NO: 271485 - DNA, 25 bp, probe
tgaaggtggagggcggcttcctcag

SEQ ID NO: 271486 - DNA, 25 bp, probe
tgaagggccagacgggttttcgtat

SEQ ID NO: 271487 - DNA, 25 bp, probe
tgaaaagctgctcggggttttttat

SEQ ID NO: 271488 - DNA, 25 bp, probe
tgaaaagctgctcggggttttttat

SEQ ID NO: 271489 - DNA, 25 bp, probe
tgaagtacttcatggtgttgttctt

SEQ ID NO: 271490 - DNA, 25 bp, probe
tgaagtactgcgtggtgtatgataa

SEQ ID NO: 271491 - DNA, 25 bp, probe
tgaacattccagagcgtgtagtgaa

SEQ ID NO: 271492 - DNA, 25 bp, probe
tgaaactggagaagttgtcaatgaa

SEQ ID NO: 271493 - DNA, 25 bp, probe
tgaaagctgtgctcagaggaggtga

SEQ ID NO: 271494 - DNA, 25 bp, probe
tgaacagctatgaacgaggccagtg

SEQ ID NO: 271495 - DNA, 25 bp, probe
tgaactgtatgcagctgtggccggc

SEQ ID NO: 271496 - DNA, 25 bp, probe
tgaaattgtcaggctgcttctctcc

SEQ ID NO: 271497 - DNA, 25 bp, probe
tgacaagcgtcagcgcaaccgctgc

SEQ ID NO: 271498 - DNA, 25 bp, probe
tgacaagctgtccaaagatcccatc

SEQ ID NO: 271499 - DNA, 25 bp, probe
tgaaatctgctgcaaaatctctctt

SEQ ID NO: 271500 - DNA, 25 bp, probe
tgaattcttggatattacttatgtc

SEQ ID NO: 271501 - DNA, 25 bp, probe
tgaaacttgggtcgatactaatgat

SEQ ID NO: 271502 - DNA, 25 bp, probe
tgaaactcaggtacaaactcgactt

SEQ ID NO: 271503 - DNA, 25 bp, probe
tgaaactcaaggaagtcaccaactt

SEQ ID NO: 271504 - DNA, 25 bp, probe
tgaacatgtaactcaggaccccttt

SEQ ID NO: 271505 - DNA, 25 bp, probe
tgaatttacctcagaagcacctatt

SEQ ID NO: 271506 - DNA, 25 bp, probe
tgcactacgaccctaacaagcggat

SEQ ID NO: 271507 - DNA, 25 bp, probe
tgacaacgccctacagcaagacgga

SEQ ID NO: 271508 - DNA, 25 bp, probe
tgaaagccctcaaggcagactgcgg

SEQ ID NO: 271509 - DNA, 25 bp, probe
tgaaaggcgattttcagcagggagt

SEQ ID NO: 271510 - DNA, 25 bp, probe
tgaagagtgggtttcacaagtgaaa

SEQ ID NO: 271511 - DNA, 25 bp, probe
tgaaagggatgattgccaacaggaa

SEQ ID NO: 271512 - DNA, 25 bp, probe
tgcaaattggtaagcagcaccttaa

SEQ ID NO: 271513 - DNA, 25 bp, probe
tgaattatataatgcagcctcttaa

SEQ ID NO: 271514 - DNA, 25 bp, probe
tgaattatataatgcagcctcttaa

SEQ ID NO: 271515 - DNA, 25 bp, probe
tgaaatcattattagctatatcatt

SEQ ID NO: 271516 - DNA, 25 bp, probe
tgaaatctgtaacctcagcacactc

SEQ ID NO: 271517 - DNA, 25 bp, probe
tgaaatctgtaacctcagcacactc

SEQ ID NO: 271518 - DNA, 25 bp, probe
tgaaagaatagacccaagcgcatca

SEQ ID NO: 271519 - DNA, 25 bp, probe
tgaaatcaccaagacacagcctcat

SEQ ID NO: 271520 - DNA, 25 bp, probe
tgaaaccaaatggactcagccctct

SEQ ID NO: 271521 - DNA, 25 bp, probe
tgaaaacctatgacaccagcttcct

SEQ ID NO: 271522 - DNA, 25 bp, probe
tgaaaacctatgacaccagcttcct

SEQ ID NO: 271523 - DNA, 25 bp, probe
tgaacaccgtgaacctcagttattg

SEQ ID NO: 271524 - DNA, 25 bp, probe
tgaacagcttggaacaccatgtcct

SEQ ID NO: 271525 - DNA, 25 bp, probe
tgaagcgttactacagcatctgcca

SEQ ID NO: 271526 - DNA, 25 bp, probe
tgaagctgtagggactcatcttgca

SEQ ID NO: 271527 - DNA, 25 bp, probe
tgaaatctcagggcactcaaatgtg

SEQ ID NO: 271528 - DNA, 25 bp, probe
tgaaatgctagaaactgagccagta

SEQ ID NO: 271529 - DNA, 25 bp, probe
tgaaatgcattccttgctagctcag

SEQ ID NO: 271530 - DNA, 25 bp, probe
tgaactcactccatgcaacatgcat

SEQ ID NO: 271531 - DNA, 25 bp, probe
tgaactcactccatgcaacatgcat

SEQ ID NO: 271532 - DNA, 25 bp, probe
tgaaaggcatcggtgccacgcatct

SEQ ID NO: 271533 - DNA, 25 bp, probe
tgaactggatcgcctccaagattgg

SEQ ID NO: 271534 - DNA, 25 bp, probe
tgaatgcggacacgtcagttttgtg

SEQ ID NO: 271535 - DNA, 25 bp, probe
tgaatgcggacacgtcagttttgtg

SEQ ID NO: 271536 - DNA, 25 bp, probe
tgaacagtgctcttgtggtaggtgg

SEQ ID NO: 271537 - DNA, 25 bp, probe
tgaagcgcatgcgcagcgggtggtc

SEQ ID NO: 271538 - DNA, 25 bp, probe
tgaagcgcatgcgcagcgggtggtc

SEQ ID NO: 271539 - DNA, 25 bp, probe
tgaagcgcatcatggaagtggtggg

SEQ ID NO: 271540 - DNA, 25 bp, probe
tgaagcccaatgccagtcgggcagc

SEQ ID NO: 271541 - DNA, 25 bp, probe
tgaacactcaattgtgtgtgggcct

SEQ ID NO: 271542 - DNA, 25 bp, probe
tgaacactcaattgtgtgtgggcct

SEQ ID NO: 271543 - DNA, 25 bp, probe
tgaacttcttcatgtatgtgacact

SEQ ID NO: 271544 - DNA, 25 bp, probe
tgaaatttgtcatggatggagggta

SEQ ID NO: 271545 - DNA, 25 bp, probe
tgaaaatatataccgtgggggtagt

SEQ ID NO: 271546 - DNA, 25 bp, probe
tgaaacttgaaccgggaagtgggag

SEQ ID NO: 271547 - DNA, 25 bp, probe
tgaaactttgacctttgaggatggc

SEQ ID NO: 271548 - DNA, 25 bp, probe
tgaaccctagaactgtcttcgactc

SEQ ID NO: 271549 - DNA, 25 bp, probe
tgaaccctagaactgtcttcgactc

SEQ ID NO: 271550 - DNA, 25 bp, probe
tgaacaccagaaaggtcacctgcct

SEQ ID NO: 271551 - DNA, 25 bp, probe
tgaagacacacgggttcacactgga

SEQ ID NO: 271552 - DNA, 25 bp, probe
tgaagtcgagcctgcttgctttgaa

SEQ ID NO: 271553 - DNA, 25 bp, probe
tgaagtcgagcctgcttgctttgaa

SEQ ID NO: 271554 - DNA, 25 bp, probe
tgcaaagaacgctctcctttgccga

SEQ ID NO: 271555 - DNA, 25 bp, probe
tgaataaaagctgtcctttcctacc

SEQ ID NO: 271556 - DNA, 25 bp, probe
tgaaggaaatgtgctccttctcagc

SEQ ID NO: 271557 - DNA, 25 bp, probe
tgaaggaaaggcctttctctcgcac

SEQ ID NO: 271558 - DNA, 25 bp, probe
tgaagcggaagagggctatccccca

SEQ ID NO: 271559 - DNA, 25 bp, probe
tgaatgggccaagcgtattccccac

SEQ ID NO: 271560 - DNA, 25 bp, probe
tgaagagggccaaactgttccccac

SEQ ID NO: 271561 - DNA, 25 bp, probe
tgcaaaagcccaaaggttcctaagc

SEQ ID NO: 271562 - DNA, 25 bp, probe
tgaaaatcctcaacactttgcctgt

SEQ ID NO: 271563 - DNA, 25 bp, probe
tgaaacatccataaaccttgcttgg

SEQ ID NO: 271564 - DNA, 25 bp, probe
tgaaatgtcaataaaccttgcttgg

SEQ ID NO: 271565 - DNA, 25 bp, probe
tgaaatgtagcaataatgtcttttg

SEQ ID NO: 271566 - DNA, 25 bp, probe
tgaaatacattcactgtctctgttg

SEQ ID NO: 271567 - DNA, 25 bp, probe
tgcaataaactcgctgttcctcgca

SEQ ID NO: 271568 - DNA, 25 bp, probe
tgcaataaactcgctgttcctcgca

SEQ ID NO: 271569 - DNA, 25 bp, probe
tgcactcaaaccaggtgatccatag

SEQ ID NO: 271570 - DNA, 25 bp, probe
tgaattcgtgccagtgcattccagc

SEQ ID NO: 271571 - DNA, 25 bp, probe
tgaatcatcggcttggtactgaaac

SEQ ID NO: 271572 - DNA, 25 bp, probe
tgaatcatcggcttggtactgaaac

SEQ ID NO: 271573 - DNA, 25 bp, probe
tgaatatgcaactgtccacttaata

SEQ ID NO: 271574 - DNA, 25 bp, probe
tgaatgacagtctgtccctcttcca

SEQ ID NO: 271575 - DNA, 25 bp, probe
tgaaagcagccatttctcctttcct

SEQ ID NO: 271576 - DNA, 25 bp, probe
tgaaagcagccatttctcctttcct

SEQ ID NO: 271577 - DNA, 25 bp, probe
tgaaagcccaaatcacctgtacttg

SEQ ID NO: 271578 - DNA, 25 bp, probe
tgaaaggtcctatacaagtcagtta

SEQ ID NO: 271579 - DNA, 25 bp, probe
tgaacctgtcctaaatcaattcctc

SEQ ID NO: 271580 - DNA, 25 bp, probe
tgaactgcttgctcatcagaaatat

SEQ ID NO: 271581 - DNA, 25 bp, probe
tgaacagtgcctcccaatgatatct

SEQ ID NO: 271582 - DNA, 25 bp, probe
tgaacagtgaggtgcagtgcgagct

SEQ ID NO: 271583 - DNA, 25 bp, probe
tgaacggtgctggcagttcggctag

SEQ ID NO: 271584 - DNA, 25 bp, probe
tgaacggtgctggcagttcggctag

SEQ ID NO: 271585 - DNA, 25 bp, probe
tgcagaaggcggggttcacgcacgt

SEQ ID NO: 271586 - DNA, 25 bp, probe
tgaaaggcctggattatctgcactc

SEQ ID NO: 271587 - DNA, 25 bp, probe
tgaacttccgaattaatctgcccac

SEQ ID NO: 271588 - DNA, 25 bp, probe
tgaacccacaaattattcttacaga

SEQ ID NO: 271589 - DNA, 25 bp, probe
tgaaccccatgatttacagcctaag

SEQ ID NO: 271590 - DNA, 25 bp, probe
tgcactcaacctcaaaagcctgact

SEQ ID NO: 271591 - DNA, 25 bp, probe
tgcttctacctggcaaaacgtcctt

SEQ ID NO: 271592 - DNA, 25 bp, probe
tgcatcgtcactttcaaagccgttc

SEQ ID NO: 271593 - DNA, 25 bp, probe
tgcatttccttgcataatcccttta

SEQ ID NO: 271594 - DNA, 25 bp, probe
tgaacttcattgcaaacaccatgga

SEQ ID NO: 271595 - DNA, 25 bp, probe
tgaactgctgttgggaaccaccacg

SEQ ID NO: 271596 - DNA, 25 bp, probe
tgaacgctgtgtgaggattgtcaac

SEQ ID NO: 271597 - DNA, 25 bp, probe
tgaacagtgtgtggggatttgcttg

SEQ ID NO: 271598 - DNA, 25 bp, probe
tgaacagtgtgtggggatttgcttg

SEQ ID NO: 271599 - DNA, 25 bp, probe
tgaacagttgtgtccagattaaggg

SEQ ID NO: 271600 - DNA, 25 bp, probe
tgaaccttgagaaaatctaccgaga

SEQ ID NO: 271601 - DNA, 25 bp, probe
tgaacatcctaaatttctacactgg

SEQ ID NO: 271602 - DNA, 25 bp, probe
tgaagccccaaaacatcttcctggt

SEQ ID NO: 271603 - DNA, 25 bp, probe
tgaagaccaacatcgccttcctgca

SEQ ID NO: 271604 - DNA, 25 bp, probe
tgaaactgtatctgccactcatttc

SEQ ID NO: 271605 - DNA, 25 bp, probe
tgcaaaattatctccagacttctac

SEQ ID NO: 271606 - DNA, 25 bp, probe
tgaaaaaacatactcgacctctccc

SEQ ID NO: 271607 - DNA, 25 bp, probe
tgaaccaaaaatccgatcacctcga

SEQ ID NO: 271608 - DNA, 25 bp, probe
tgaagagccaaaactttcccctgat

SEQ ID NO: 271609 - DNA, 25 bp, probe
tgaagagccaaaactttcccctgat

SEQ ID NO: 271610 - DNA, 25 bp, probe
tgaaacgcaaagccagttctcccgt

SEQ ID NO: 271611 - DNA, 25 bp, probe
tgaattggcaaagtcttgtccccgt

SEQ ID NO: 271612 - DNA, 25 bp, probe
tgaattggcaaagtcttgtccccgt

SEQ ID NO: 271613 - DNA, 25 bp, probe
tgaaagtcataattcttcatcctcc

SEQ ID NO: 271614 - DNA, 25 bp, probe
tgaacagtaacttctctcagcactc

SEQ ID NO: 271615 - DNA, 25 bp, probe
tgaatcaatagcagcgtccagtccc

SEQ ID NO: 271616 - DNA, 25 bp, probe
tgaagctgacgaacttccatggccc

SEQ ID NO: 271617 - DNA, 25 bp, probe
tgcaactggcaaacctgccgacgcc

SEQ ID NO: 271618 - DNA, 25 bp, probe
tgaagtgggcatccccagtgacgga

SEQ ID NO: 271619 - DNA, 25 bp, probe
tgaagtgggcatccccagtgacgga

SEQ ID NO: 271620 - DNA, 25 bp, probe
tgaagctggtgaccccggaggggtc

SEQ ID NO: 271621 - DNA, 25 bp, probe
tgcaacggagactccggtgggccgc

SEQ ID NO: 271622 - DNA, 25 bp, probe
tgaagcgggaagtctccaagggccg

SEQ ID NO: 271623 - DNA, 25 bp, probe
tgaacctggacatcgccaaagagac

SEQ ID NO: 271624 - DNA, 25 bp, probe
tgaaactgcgaatggctcattaaat

SEQ ID NO: 271625 - DNA, 25 bp, probe
tgaaactgggtgcgtctgagcacgt

SEQ ID NO: 271626 - DNA, 25 bp, probe
tgaaaaggaggccgtgcttcagcgc

SEQ ID NO: 271627 - DNA, 25 bp, probe
tgaaacaggggcccatcatcatgtc

SEQ ID NO: 271628 - DNA, 25 bp, probe
tgaaggcaggtgccaacatcacgcc

SEQ ID NO: 271629 - DNA, 25 bp, probe
tgaagggtatgtcacaaggagctga

SEQ ID NO: 271630 - DNA, 25 bp, probe
tgaatggccaagcaaaaatgatcga

SEQ ID NO: 271631 - DNA, 25 bp, probe
tgaagagctccaaagcaattatgat

SEQ ID NO: 271632 - DNA, 25 bp, probe
tgaaacctgcatagagtttgcaaag

SEQ ID NO: 271633 - DNA, 25 bp, probe
tgcagcaacctgtgacaggatcaag

SEQ ID NO: 271634 - DNA, 25 bp, probe
tgcagccaggttggcatcaaaagga

SEQ ID NO: 271635 - DNA, 25 bp, probe
tgcagccaggatggtaaggccagct

SEQ ID NO: 271636 - DNA, 25 bp, probe
tgcaatagcaaccataactgccact

SEQ ID NO: 271637 - DNA, 25 bp, probe
tgaatatgcagactgcagggcttga

SEQ ID NO: 271638 - DNA, 25 bp, probe
tgaacatgaactgtggcattacccc

SEQ ID NO: 271639 - DNA, 25 bp, probe
tgaactgaagctactggtactcccc

SEQ ID NO: 271640 - DNA, 25 bp, probe
tgaactgaagctactggtactcccc

SEQ ID NO: 271641 - DNA, 25 bp, probe
tgaatgcatgacctttggtacatgc

SEQ ID NO: 271642 - DNA, 25 bp, probe
tgaaaacctttcctacagttcctat

SEQ ID NO: 271643 - DNA, 25 bp, probe
tgaaacagcagcttgtcaacaagtt

SEQ ID NO: 271644 - DNA, 25 bp, probe
tgaaactcagccatcccaagctggt

SEQ ID NO: 271645 - DNA, 25 bp, probe
tgaaactcagccatcccaagctggt

SEQ ID NO: 271646 - DNA, 25 bp, probe
tgcacaaataccccaccagaatgtc

SEQ ID NO: 271647 - DNA, 25 bp, probe
tgcatcaaaaccctccttgaattgg

SEQ ID NO: 271648 - DNA, 25 bp, probe
tgcacccaaactacttctggatggt

SEQ ID NO: 271649 - DNA, 25 bp, probe
tgcacacttaacactcgcatgggga

SEQ ID NO: 271650 - DNA, 25 bp, probe
tgaatttgtacttctgcggtgctgg

SEQ ID NO: 271651 - DNA, 25 bp, probe
tgaatttgtgcccctggattggaac

SEQ ID NO: 271652 - DNA, 25 bp, probe
tgaagttcatcccaaaattggggcg

SEQ ID NO: 271653 - DNA, 25 bp, probe
tgaatttgcacagaggaaagcgggt

SEQ ID NO: 271654 - DNA, 25 bp, probe
tgcaacttgcacggggagaagctgc

SEQ ID NO: 271655 - DNA, 25 bp, probe
tgaagcgtcggccggagatgagccg

SEQ ID NO: 271656 - DNA, 25 bp, probe
tgaaggagcacgtggcagctgtggc

SEQ ID NO: 271657 - DNA, 25 bp, probe
tgaaggagcacgtggcagctgtggc

SEQ ID NO: 271658 - DNA, 25 bp, probe
tgaagggcatcacagtgactcccac

SEQ ID NO: 271659 - DNA, 25 bp, probe
tgaagtgtcaccagtatctactact

SEQ ID NO: 271660 - DNA, 25 bp, probe
tgaagttacaaacatacagccatct

SEQ ID NO: 271661 - DNA, 25 bp, probe
tgaagatgctcacaaaccacacctt

SEQ ID NO: 271662 - DNA, 25 bp, probe
tgaagcactgaaactactgccacct

SEQ ID NO: 271663 - DNA, 25 bp, probe
tgaagcactgaaactactgccacct

SEQ ID NO: 271664 - DNA, 25 bp, probe
tgaagcactgaaactactgccacct

SEQ ID NO: 271665 - DNA, 25 bp, probe
tgaatgcctactgtaggcctcctaa

SEQ ID NO: 271666 - DNA, 25 bp, probe
tgaaggtcagtatatggagtccata

SEQ ID NO: 271667 - DNA, 25 bp, probe
tgaagggcgtcaatctggaccacac

SEQ ID NO: 271668 - DNA, 25 bp, probe
tgaaggcggttgtttagctctcact

SEQ ID NO: 271669 - DNA, 25 bp, probe
tgcaatgggcagagacctacctgca

SEQ ID NO: 271670 - DNA, 25 bp, probe
tgcaggagtcagcgttcaatcttga

SEQ ID NO: 271671 - DNA, 25 bp, probe
tgcaaggatctgcagttactttgaa

SEQ ID NO: 271672 - DNA, 25 bp, probe
tgaagcgcactgctgttcagatagg

SEQ ID NO: 271673 - DNA, 25 bp, probe
tgaagctcctgcagcttctgtgagc

SEQ ID NO: 271674 - DNA, 25 bp, probe
tgaaacagctgcagcacagcgggcc

SEQ ID NO: 271675 - DNA, 25 bp, probe
tgaactctgtgctgagcaaggccct

SEQ ID NO: 271676 - DNA, 25 bp, probe
tgcaactcttgataaagggctgttt

SEQ ID NO: 271677 - DNA, 25 bp, probe
tcaactttttcaaagaggtggacga

SEQ ID NO: 271678 - DNA, 25 bp, probe
tgctacgtctttaaggcggggaagt

SEQ ID NO: 271679 - DNA, 25 bp, probe
tgcttctttcatgtcaggcgttaaa

SEQ ID NO: 271680 - DNA, 25 bp, probe
tgctttttaccctggaagaaatact

SEQ ID NO: 271681 - DNA, 25 bp, probe
tgcgtccctgactactggtacgaaa

SEQ ID NO: 271682 - DNA, 25 bp, probe
tgcgtccctgactactggtacgaaa

SEQ ID NO: 271683 - DNA, 25 bp, probe
tgcagtcacctatacattatttaaa

SEQ ID NO: 271684 - DNA, 25 bp, probe
tgcaattgacttcccttttttaatg

SEQ ID NO: 271685 - DNA, 25 bp, probe
tgaattcacattccctgactttgta

SEQ ID NO: 271686 - DNA, 25 bp, probe
tgaatgtcccttccaacttttatat

SEQ ID NO: 271687 - DNA, 25 bp, probe
tgcttgtcccttctgactgggttaa

SEQ ID NO: 271688 - DNA, 25 bp, probe
tgcttggcttctgtgtatctaggtg

SEQ ID NO: 271689 - DNA, 25 bp, probe
tgcgattgctgtagcggttgccagg

SEQ ID NO: 271690 - DNA, 25 bp, probe
tgcagccagctttgcaggttatcag

SEQ ID NO: 271691 - DNA, 25 bp, probe
tgaagatgctgcacagtttacagat

SEQ ID NO: 271692 - DNA, 25 bp, probe
tgaatattcccaattttcgaagtca

SEQ ID NO: 271693 - DNA, 25 bp, probe
tgcaaggtacaattttctccaataa

SEQ ID NO: 271694 - DNA, 25 bp, probe
tgcataattatatactccttaatac

SEQ ID NO: 271695 - DNA, 25 bp, probe
tgaatttataaagtacccatctagt

SEQ ID NO: 271696 - DNA, 25 bp, probe
tgaactgattgaaaactcccatcta

SEQ ID NO: 271697 - DNA, 25 bp, probe
tgaacttcgagatacgggcacatac

SEQ ID NO: 271698 - DNA, 25 bp, probe
tgaacttcgagatacaggcagatat

SEQ ID NO: 271699 - DNA, 25 bp, probe
tgaactctcgaatctgcatccagat

SEQ ID NO: 271700 - DNA, 25 bp, probe
tgaactgcttgaaactctgctggaa

SEQ ID NO: 271701 - DNA, 25 bp, probe
tgaacagtctgaggagccgcgagta

SEQ ID NO: 271702 - DNA, 25 bp, probe
tgaacacagttctgccggcagatat

SEQ ID NO: 271703 - DNA, 25 bp, probe
tgaaccgcttcatgccactgaatac

SEQ ID NO: 271704 - DNA, 25 bp, probe
tgaaccgcttcatgccactgaatac

SEQ ID NO: 271705 - DNA, 25 bp, probe
tgaacaagcctctcatcactgttag

SEQ ID NO: 271706 - DNA, 25 bp, probe
tgaacaatactttgtaatttatgat

SEQ ID NO: 271707 - DNA, 25 bp, probe
tgaacaatccttttcagtattatat

SEQ ID NO: 271708 - DNA, 25 bp, probe
tgaaccgttgcttgtggatttatag

SEQ ID NO: 271709 - DNA, 25 bp, probe
tgaacttcttgtgggagatactcag

SEQ ID NO: 271710 - DNA, 25 bp, probe
tgaagctcttcgtgcgagaacctga

SEQ ID NO: 271711 - DNA, 25 bp, probe
tgaagttgccgatgatgaggaccga

SEQ ID NO: 271712 - DNA, 25 bp, probe
tgaacgggctcatggagcggcctga

SEQ ID NO: 271713 - DNA, 25 bp, probe
tgaaaagtgccatcgagggcatcaa

SEQ ID NO: 271714 - DNA, 25 bp, probe
tgaatatgagaggaacgggagatat

SEQ ID NO: 271715 - DNA, 25 bp, probe
tgaatcacagaatagcggtaccatg

SEQ ID NO: 271716 - DNA, 25 bp, probe
tgaatcacagaatagcggtaccatg

SEQ ID NO: 271717 - DNA, 25 bp, probe
tgaacacatatataggagaacatct

SEQ ID NO: 271718 - DNA, 25 bp, probe
tgaacacatatataggagaacatct

SEQ ID NO: 271719 - DNA, 25 bp, probe
tgcaactcaattacaaaggacacag

SEQ ID NO: 271720 - DNA, 25 bp, probe
tgaacagcattgtaaaatggcacaa

SEQ ID NO: 271721 - DNA, 25 bp, probe
tgaagctcatgggaaaattgtgatc

SEQ ID NO: 271722 - DNA, 25 bp, probe
tgaagctctggaaacagatgtctag

SEQ ID NO: 271723 - DNA, 25 bp, probe
tgaacttgtggaccatgtactgcag

SEQ ID NO: 271724 - DNA, 25 bp, probe
tgaactttggcgctgctggcagcat

SEQ ID NO: 271725 - DNA, 25 bp, probe
tgaagctaacaggcctgctgggctc

SEQ ID NO: 271726 - DNA, 25 bp, probe
tgaagcataatcccagccagaggcc

SEQ ID NO: 271727 - DNA, 25 bp, probe
tgaatatgatgtcctcatagaaggt

SEQ ID NO: 271728 - DNA, 25 bp, probe
tgaaaagatctccaagaggtttgtc

SEQ ID NO: 271729 - DNA, 25 bp, probe
tgaacacgtttttgaagttcttcaa

SEQ ID NO: 271730 - DNA, 25 bp, probe
tgaacacgtttttgaagttcttcaa

SEQ ID NO: 271731 - DNA, 25 bp, probe
tgaacactcttggtagaagcccttc

SEQ ID NO: 271732 - DNA, 25 bp, probe
tgcattccatttctggaagtgactt

SEQ ID NO: 271733 - DNA, 25 bp, probe
tgcagcccatttttgaaatgtcagc

SEQ ID NO: 271734 - DNA, 25 bp, probe
tgaatccagttgtctatacattcag

SEQ ID NO: 271735 - DNA, 25 bp, probe
tgaaccagctgccacagctacttct

SEQ ID NO: 271736 - DNA, 25 bp, probe
tgaatctcaggcgcagcgcctcgcg

SEQ ID NO: 271737 - DNA, 25 bp, probe
tgaacacgagtgacagggctccggg

SEQ ID NO: 271738 - DNA, 25 bp, probe
tgaactgcagggacgcggggcagga

SEQ ID NO: 271739 - DNA, 25 bp, probe
tgaagcacagggagagtgggaacca

SEQ ID NO: 271740 - DNA, 25 bp, probe
tgaaccagaggtgagggcagcacac

SEQ ID NO: 271741 - DNA, 25 bp, probe
tgaactcagcacattcgggaccaat

SEQ ID NO: 271742 - DNA, 25 bp, probe
tgaagcccctctgcaggatacaaat

SEQ ID NO: 271743 - DNA, 25 bp, probe
tgaagcccctctgcaggatacaaat

SEQ ID NO: 271744 - DNA, 25 bp, probe
tgcaacctcaccacaagtacaaaga

SEQ ID NO: 271745 - DNA, 25 bp, probe
tgcaaactcaacacaattgtaagta

SEQ ID NO: 271746 - DNA, 25 bp, probe
tgaactctaaagacaatgtacaaga

SEQ ID NO: 271747 - DNA, 25 bp, probe
tgcacaccgtaaccacagtcaggaa

SEQ ID NO: 271748 - DNA, 25 bp, probe
tgcacaccgtaaccacagtcaggaa

SEQ ID NO: 271749 - DNA, 25 bp, probe
tgaagtcactaacaccatccaaata

SEQ ID NO: 271750 - DNA, 25 bp, probe
tgaagtcacccacccatatggaaat

SEQ ID NO: 271751 - DNA, 25 bp, probe
tgaactacctcaccacagtggaaga

SEQ ID NO: 271752 - DNA, 25 bp, probe
tgcaattattccccatgaacgagga

SEQ ID NO: 271753 - DNA, 25 bp, probe
tgcaactgttccgcaaactggggct

SEQ ID NO: 271754 - DNA, 25 bp, probe
tgaactatatccgtaacctggatag

SEQ ID NO: 271755 - DNA, 25 bp, probe
tgaatcttccctgttgcctagaagg

SEQ ID NO: 271756 - DNA, 25 bp, probe
tgaacgtgcatattgccttgcaaag

SEQ ID NO: 271757 - DNA, 25 bp, probe
tgaacagcatcaatttcgacaaaga

SEQ ID NO: 271758 - DNA, 25 bp, probe
tgaagatgtcatattgggagaatta

SEQ ID NO: 271759 - DNA, 25 bp, probe
tgaagatgtcatattgggagaatta

SEQ ID NO: 271760 - DNA, 25 bp, probe
tgaagcatctcaattgctggaggaa

SEQ ID NO: 271761 - DNA, 25 bp, probe
tgaactgctcatttggaggacagca

SEQ ID NO: 271762 - DNA, 25 bp, probe
tgcacttgccatgctggaaaccagc

SEQ ID NO: 271763 - DNA, 25 bp, probe
tgcttattccagtctgaaaccaaaa

SEQ ID NO: 271764 - DNA, 25 bp, probe
tgcaagttcaatccctaaaacaaaa

SEQ ID NO: 271765 - DNA, 25 bp, probe
tgaagtgtcaaccatccagaacaca

SEQ ID NO: 271766 - DNA, 25 bp, probe
tgaagtgtcaaccatccagaacaca

SEQ ID NO: 271767 - DNA, 25 bp, probe
tgcacagtgtgcatctgacggaccc

SEQ ID NO: 271768 - DNA, 25 bp, probe
tgcactggtgcggctgaaagaccca

SEQ ID NO: 271769 - DNA, 25 bp, probe
tgcactggtggaagaagcgatcttt

SEQ ID NO: 271770 - DNA, 25 bp, probe
tgaaggggaaaggcattctttcatt

SEQ ID NO: 271771 - DNA, 25 bp, probe
tgaagcagtggattaaccttttcct

SEQ ID NO: 271772 - DNA, 25 bp, probe
tgaagcagtggattaaccttttcct

SEQ ID NO: 271773 - DNA, 25 bp, probe
tgaactgtgtgtgaatctgcttttc

SEQ ID NO: 271774 - DNA, 25 bp, probe
tgaactggctgagaattctccttta

SEQ ID NO: 271775 - DNA, 25 bp, probe
tgaacatgcagcactgcaacctcct

SEQ ID NO: 271776 - DNA, 25 bp, probe
tgaatgcagactctgctaccatttt

SEQ ID NO: 271777 - DNA, 25 bp, probe
tgaatgggtgaacaacactgctggt

SEQ ID NO: 271778 - DNA, 25 bp, probe
tgaaggaaaagccatagcaggagtt

SEQ ID NO: 271779 - DNA, 25 bp, probe
tgaaggtcaaaccggaggagagact

SEQ ID NO: 271780 - DNA, 25 bp, probe
tgaaggtcttaaagaaggacgtcat

SEQ ID NO: 271781 - DNA, 25 bp, probe
tgaatggtttaaacaggaccttcca

SEQ ID NO: 271782 - DNA, 25 bp, probe
tgaatggtttaaacaggaccttcca

SEQ ID NO: 271783 - DNA, 25 bp, probe
tgaagaatttacagctcagactatt

SEQ ID NO: 271784 - DNA, 25 bp, probe
tgaagaaatttcacagcagtttatt

SEQ ID NO: 271785 - DNA, 25 bp, probe
tgaagaaactccaagggtttgagta

SEQ ID NO: 271786 - DNA, 25 bp, probe
tgcaaaggacctcaggggacaggta

SEQ ID NO: 271787 - DNA, 25 bp, probe
tgcaaaggacctcaggggacaggta

SEQ ID NO: 271788 - DNA, 25 bp, probe
tgaacgtgcacctgcggggacagga

SEQ ID NO: 271789 - DNA, 25 bp, probe
tgaacgtgcacctgcggggacagga

SEQ ID NO: 271790 - DNA, 25 bp, probe
tgaacagcaccctggggacagcagc

SEQ ID NO: 271791 - DNA, 25 bp, probe
tgaacagcaccctggggacagcagc

SEQ ID NO: 271792 - DNA, 25 bp, probe
tgaaggaccctgggggacggacact

SEQ ID NO: 271793 - DNA, 25 bp, probe
tgcaaggacggaggcgggtcgggac

SEQ ID NO: 271794 - DNA, 25 bp, probe
tgaaggggagagacaggggccgccc

SEQ ID NO: 271795 - DNA, 25 bp, probe
tgaaggggatagggcgaggctgtgc

SEQ ID NO: 271796 - DNA, 25 bp, probe
tgaaggatgttatggaaggcgtgct

SEQ ID NO: 271797 - DNA, 25 bp, probe
tgaagggcgcatatggaacggctct

SEQ ID NO: 271798 - DNA, 25 bp, probe
tgaatgtgggattattgaatgggtg

SEQ ID NO: 271799 - DNA, 25 bp, probe
tgaatgtatccatttgtacatggtt

SEQ ID NO: 271800 - DNA, 25 bp, probe
tgaagtatccacttttacatgtatt

SEQ ID NO: 271801 - DNA, 25 bp, probe
tgaagatgaacatttattgatcttc

SEQ ID NO: 271802 - DNA, 25 bp, probe
tgaacatgagcgtctctttgacctc

SEQ ID NO: 271803 - DNA, 25 bp, probe
tgaacatgagcgtctctttgacctc

SEQ ID NO: 271804 - DNA, 25 bp, probe
tgaacatgagcgtctctttgacctc

SEQ ID NO: 271805 - DNA, 25 bp, probe
tgaactgcagattgtcctgttcctc

SEQ ID NO: 271806 - DNA, 25 bp, probe
tgaagccagagctagttgcgtccca

SEQ ID NO: 271807 - DNA, 25 bp, probe
tgaagtgcaaaaatgtggtcccagt

SEQ ID NO: 271808 - DNA, 25 bp, probe
tgaagcactataatattgttcccat

SEQ ID NO: 271809 - DNA, 25 bp, probe
tgaacctgcattactgtggtcccag

SEQ ID NO: 271810 - DNA, 25 bp, probe
tgaagccgcttagtgctgtggcctc

SEQ ID NO: 271811 - DNA, 25 bp, probe
tgaatggcctctttgtgaccagcca

SEQ ID NO: 271812 - DNA, 25 bp, probe
tgaaggcctcatcttcatcaacatc

SEQ ID NO: 271813 - DNA, 25 bp, probe
tgaaggcctcatcttcatcaacatc

SEQ ID NO: 271814 - DNA, 25 bp, probe
tgaaggcctcatcttcatcaacatc

SEQ ID NO: 271815 - DNA, 25 bp, probe
tgaagacagctttttctgagacaca

SEQ ID NO: 271816 - DNA, 25 bp, probe
tgaagcatagctgagtagttgaact

SEQ ID NO: 271817 - DNA, 25 bp, probe
tgcaactcatgttatgggttaaatg

SEQ ID NO: 271818 - DNA, 25 bp, probe
tgaacttgtcctcttaaaatgtgtc

SEQ ID NO: 271819 - DNA, 25 bp, probe
tgcaacgttcctgatttctaatctt

SEQ ID NO: 271820 - DNA, 25 bp, probe
tgaagctgttccggcattactatgt

SEQ ID NO: 271821 - DNA, 25 bp, probe
tgaactgtactgctgcatttcctgt

SEQ ID NO: 271822 - DNA, 25 bp, probe
tgcaaggtcacgcggctgtccttgc

SEQ ID NO: 271823 - DNA, 25 bp, probe
tgaaggtcatccagagctgcttcct

SEQ ID NO: 271824 - DNA, 25 bp, probe
tgaaggtcatccagagctgcttcct

SEQ ID NO: 271825 - DNA, 25 bp, probe
tgaagatgttctctagccttccacc

SEQ ID NO: 271826 - DNA, 25 bp, probe
tgaagtttattctcagatctgccag

SEQ ID NO: 271827 - DNA, 25 bp, probe
tgaagtctgacatttggagtctggg

SEQ ID NO: 271828 - DNA, 25 bp, probe
tgaagacgaatatgatctgtgctgg

SEQ ID NO: 271829 - DNA, 25 bp, probe
tgaagaccctgatgatccagctgct

SEQ ID NO: 271830 - DNA, 25 bp, probe
tgaagccctttattgacatggttct

SEQ ID NO: 271831 - DNA, 25 bp, probe
tgaacctgttgtatatcatggctac

SEQ ID NO: 271832 - DNA, 25 bp, probe
tgaagtcgtattatacagtacatct

SEQ ID NO: 271833 - DNA, 25 bp, probe
tgaatgttttgcatcttgattaact

SEQ ID NO: 271834 - DNA, 25 bp, probe
tgaagatcttttacttgttaacaaa

SEQ ID NO: 271835 - DNA, 25 bp, probe
tgaaggttttagacagttactcaac

SEQ ID NO: 271836 - DNA, 25 bp, probe
tgaaggttttagacagttactcaac

SEQ ID NO: 271837 - DNA, 25 bp, probe
tgaaggttttagttgtggacacagt

SEQ ID NO: 271838 - DNA, 25 bp, probe
tgaaggttttctgtgtgctgcacgg

SEQ ID NO: 271839 - DNA, 25 bp, probe
tgaagggttctcgtatgtcaacccc

SEQ ID NO: 271840 - DNA, 25 bp, probe
tgaaggttttgagtatatcaatcct

SEQ ID NO: 271841 - DNA, 25 bp, probe
tgcagagtttgttgactttacctca

SEQ ID NO: 271842 - DNA, 25 bp, probe
tgcacgctttatgccttcaatactc

SEQ ID NO: 271843 - DNA, 25 bp, probe
tgcacctttataaatcacatgaatg

SEQ ID NO: 271844 - DNA, 25 bp, probe
tgcactcggtacaccatcaaagcag

SEQ ID NO: 271845 - DNA, 25 bp, probe
tgcacttttacaagccgcaaaggca

SEQ ID NO: 271846 - DNA, 25 bp, probe
tgaatgccttactctcagcagtcag

SEQ ID NO: 271847 - DNA, 25 bp, probe
tgaaggagtacaccatcaagtcgca

SEQ ID NO: 271848 - DNA, 25 bp, probe
tgaaggactacatgatcaccatcac

SEQ ID NO: 271849 - DNA, 25 bp, probe
tgaaggactacatgatcaccatcac

SEQ ID NO: 271850 - DNA, 25 bp, probe
tgcaagagctcagcacgatccacat

SEQ ID NO: 271851 - DNA, 25 bp, probe
tgaagaggcaacggatctcctggcg

SEQ ID NO: 271852 - DNA, 25 bp, probe
tgaagaccagacagctctgcctgaa

SEQ ID NO: 271853 - DNA, 25 bp, probe
tgaagaccagacagctctgcctgaa

SEQ ID NO: 271854 - DNA, 25 bp, probe
tgaagcctggcacgatgtctccaga

SEQ ID NO: 271855 - DNA, 25 bp, probe
tgaatggggatgtcagtgctcctag

SEQ ID NO: 271856 - DNA, 25 bp, probe
tgaaggtggtgatggccctcacgta

SEQ ID NO: 271857 - DNA, 25 bp, probe
tgaaggtggtgatggccctcacgta

SEQ ID NO: 271858 - DNA, 25 bp, probe
tgaagagagggcatccctcgccgga

SEQ ID NO: 271859 - DNA, 25 bp, probe
tgaagagagggcatccctcgccgga

SEQ ID NO: 271860 - DNA, 25 bp, probe
tgaagaagaaagactccctgcacgg

SEQ ID NO: 271861 - DNA, 25 bp, probe
tgaatgaagaaagtccagacctcgg

SEQ ID NO: 271862 - DNA, 25 bp, probe
tgaatccaataagccttcccggaca

SEQ ID NO: 271863 - DNA, 25 bp, probe
tgaactaatcgagcacttctcacca

SEQ ID NO: 271864 - DNA, 25 bp, probe
tgccctaattagggcatcctgcccc

SEQ ID NO: 271865 - DNA, 25 bp, probe
tgccgataccggggatggaccccgc

SEQ ID NO: 271866 - DNA, 25 bp, probe
tgccgtacttggaggacctgcacgg

SEQ ID NO: 271867 - DNA, 25 bp, probe
tgctggctactgtgtggccacgtac

SEQ ID NO: 271868 - DNA, 25 bp, probe
tgcaggtacatgacattccgcacgt

SEQ ID NO: 271869 - DNA, 25 bp, probe
tgcaaggcagtaattccccttaggc

SEQ ID NO: 271870 - DNA, 25 bp, probe
tgcagaggcatttttccttcgggga

SEQ ID NO: 271871 - DNA, 25 bp, probe
tgaaggcatctacaccattaagagt

SEQ ID NO: 271872 - DNA, 25 bp, probe
tgaagccatcaacatcacaaataat

SEQ ID NO: 271873 - DNA, 25 bp, probe
tgaagccatcaacatcacaaataat

SEQ ID NO: 271874 - DNA, 25 bp, probe
tgaagccatctacctagcaaaatta

SEQ ID NO: 271875 - DNA, 25 bp, probe
tgaagtgcagttcccaccaaaatga

SEQ ID NO: 271876 - DNA, 25 bp, probe
tgaaggacatcatccaccgtgacat

SEQ ID NO: 271877 - DNA, 25 bp, probe
tgcgaaggatgatcgcccgataaag

SEQ ID NO: 271878 - DNA, 25 bp, probe
tgcaaaaatgtggtcccagtgtatg

SEQ ID NO: 271879 - DNA, 25 bp, probe
tgaagtactggcagcccacttcagc

SEQ ID NO: 271880 - DNA, 25 bp, probe
tgaagatgagctggattcccacacc

SEQ ID NO: 271881 - DNA, 25 bp, probe
tgaaggagattgacatcgctgccac

SEQ ID NO: 271882 - DNA, 25 bp, probe
tgaagaggatcttctggctgctagg

SEQ ID NO: 271883 - DNA, 25 bp, probe
tgaatgaggactgtgaactgaagat

SEQ ID NO: 271884 - DNA, 25 bp, probe
tgaagaggagctggctgcccttcag

SEQ ID NO: 271885 - DNA, 25 bp, probe
tgcacagggactttcctctgtcaac

SEQ ID NO: 271886 - DNA, 25 bp, probe
tgcagaaggttctgccctctaagct

SEQ ID NO: 271887 - DNA, 25 bp, probe
tgcagaaggtgttcctttctcacag

SEQ ID NO: 271888 - DNA, 25 bp, probe
tgcagaaggtgttcctttctcacag

SEQ ID NO: 271889 - DNA, 25 bp, probe
tgcagaagttaacatccccagatgt

SEQ ID NO: 271890 - DNA, 25 bp, probe
tgcagaagttaacatccccagatgt

SEQ ID NO: 271891 - DNA, 25 bp, probe
tgcacaggtaatacaacacgccgga

SEQ ID NO: 271892 - DNA, 25 bp, probe
tgaagggatgaccaaccacgagacg

SEQ ID NO: 271893 - DNA, 25 bp, probe
tgaagggatgaccaaccacgagacg

SEQ ID NO: 271894 - DNA, 25 bp, probe
tgaagggatgaccaaccacgagacg

SEQ ID NO: 271895 - DNA, 25 bp, probe
tgaatgtccagcacaacctctggcc

SEQ ID NO: 271896 - DNA, 25 bp, probe
tgaagtccgcatgaaacactgcacc

SEQ ID NO: 271897 - DNA, 25 bp, probe
tgaattcacgatgggtgctcactgc

SEQ ID NO: 271898 - DNA, 25 bp, probe
tgaagatgcctgtgggcatcctccc

SEQ ID NO: 271899 - DNA, 25 bp, probe
tacagacctggccagttcaatccaa

SEQ ID NO: 271900 - DNA, 25 bp, probe
tgcacgacgtgggaggctacccaga

SEQ ID NO: 271901 - DNA, 25 bp, probe
tgcagcgacctgcaagaaactccac

SEQ ID NO: 271902 - DNA, 25 bp, probe
tgctggtcggagagaacctagcctc

SEQ ID NO: 271903 - DNA, 25 bp, probe
tgaatgtaggaaacaaccattccag

SEQ ID NO: 271904 - DNA, 25 bp, probe
tgaatgctagacagaaaccaagcca

SEQ ID NO: 271905 - DNA, 25 bp, probe
tgaagctaaaataaaccagactcac

SEQ ID NO: 271906 - DNA, 25 bp, probe
tgcacactgaaattttacttgaaca

SEQ ID NO: 271907 - DNA, 25 bp, probe
tgaatcttatcaacttactcataaa

SEQ ID NO: 271908 - DNA, 25 bp, probe
tgaatcttatcaacttactcataaa

SEQ ID NO: 271909 - DNA, 25 bp, probe
tgaatgataatcaacataatgctga

SEQ ID NO: 271910 - DNA, 25 bp, probe
tgaattctactatttatgtgatcct

SEQ ID NO: 271911 - DNA, 25 bp, probe
tgaattcattctgatgcttggcccc

SEQ ID NO: 271912 - DNA, 25 bp, probe
tgaatgagcaaggcctcttggacaa

SEQ ID NO: 271913 - DNA, 25 bp, probe
tgaatagcacaactctttaacctga

SEQ ID NO: 271914 - DNA, 25 bp, probe
tgcaatctgcaatcctttaaggtat

SEQ ID NO: 271915 - DNA, 25 bp, probe
tgaatgagaaacgtgtttagtatca

SEQ ID NO: 271916 - DNA, 25 bp, probe
tgaagcagaaacatgctttcctagc

SEQ ID NO: 271917 - DNA, 25 bp, probe
tgaagatacaggccactcttcctac

SEQ ID NO: 271918 - DNA, 25 bp, probe
tgaagaccatgggcatgtcctccga

SEQ ID NO: 271919 - DNA, 25 bp, probe
tgaagatggcatcgccagtctccat

SEQ ID NO: 271920 - DNA, 25 bp, probe
tgaagatgacaatcatgttgcagca

SEQ ID NO: 271921 - DNA, 25 bp, probe
tgaagaagcacttctgctgcatcgc

SEQ ID NO: 271922 - DNA, 25 bp, probe
tgaagcaccctaatgtgattgcatt

SEQ ID NO: 271923 - DNA, 25 bp, probe
tgaagcaccctaatgtgattgcatt

SEQ ID NO: 271924 - DNA, 25 bp, probe
tgaagacggctgcctggcattggta

SEQ ID NO: 271925 - DNA, 25 bp, probe
tgaagaggtgcggtggcttcctgat

SEQ ID NO: 271926 - DNA, 25 bp, probe
tgaagcagggccgtactttgctgca

SEQ ID NO: 271927 - DNA, 25 bp, probe
tgaagcagcccgcatattaggcgca

SEQ ID NO: 271928 - DNA, 25 bp, probe
tgaagccctccaatatgctagtaaa

SEQ ID NO: 271929 - DNA, 25 bp, probe
tgcaacctccctaatgcaggtctca

SEQ ID NO: 271930 - DNA, 25 bp, probe
tgcaacttgcccaacatcaatcttc

SEQ ID NO: 271931 - DNA, 25 bp, probe
tgcaatattcactaagacattccaa

SEQ ID NO: 271932 - DNA, 25 bp, probe
tgcaatccacaatctgacattctca

SEQ ID NO: 271933 - DNA, 25 bp, probe
tgaaccacacagccgagcatttgtt

SEQ ID NO: 271934 - DNA, 25 bp, probe
tgaacgacatcaccgaggagtgtag

SEQ ID NO: 271935 - DNA, 25 bp, probe
tgaacctcatcatcagggagtgaaa

SEQ ID NO: 271936 - DNA, 25 bp, probe
tgaaccacattctggggaagactat

SEQ ID NO: 271937 - DNA, 25 bp, probe
tgaaggcagccctggggaagctcat

SEQ ID NO: 271938 - DNA, 25 bp, probe
tgaaggcccctgacagggctggctt

SEQ ID NO: 271939 - DNA, 25 bp, probe
tgaaggtccacgcagaagcaggctc

SEQ ID NO: 271940 - DNA, 25 bp, probe
tgaaggtccacgcagaagcaggctc

SEQ ID NO: 271941 - DNA, 25 bp, probe
tgaagaatgcccatgccaaggcctc

SEQ ID NO: 271942 - DNA, 25 bp, probe
tgaagaatgccctcagcaggacctt

SEQ ID NO: 271943 - DNA, 25 bp, probe
tgaagaaggccttccaggccacgct

SEQ ID NO: 271944 - DNA, 25 bp, probe
tgaagaagttcttcaccgtggccat

SEQ ID NO: 271945 - DNA, 25 bp, probe
tgaagaagttcttcaccgtggccat

SEQ ID NO: 271946 - DNA, 25 bp, probe
tgaagactgtttcatgctttgctcc

SEQ ID NO: 271947 - DNA, 25 bp, probe
tgaagccaggaactatgtctgtgca

SEQ ID NO: 271948 - DNA, 25 bp, probe
tgaaggcaggcatgctgattcctga

SEQ ID NO: 271949 - DNA, 25 bp, probe
tgcaaggaggcttgctggacctaaa

SEQ ID NO: 271950 - DNA, 25 bp, probe
tgcagatacacgaactggatccaaa

SEQ ID NO: 271951 - DNA, 25 bp, probe
tgaatagccaggcctgacctcaagc

SEQ ID NO: 271952 - DNA, 25 bp, probe
tgaagatgccgcacacaaacaatgc

SEQ ID NO: 271953 - DNA, 25 bp, probe
tgaagagcccatcacaggccaacaa

SEQ ID NO: 271954 - DNA, 25 bp, probe
tgaagatctacatcacagtccgaaa

SEQ ID NO: 271955 - DNA, 25 bp, probe
tgaagacttcatccggatccgggat

SEQ ID NO: 271956 - DNA, 25 bp, probe
tgaatatttcatccggaagccgcca

SEQ ID NO: 271957 - DNA, 25 bp, probe
tgaagatcttctctctggatccgga

SEQ ID NO: 271958 - DNA, 25 bp, probe
tgaagtatggctgtaagtctcatgg

SEQ ID NO: 271959 - DNA, 25 bp, probe
tgcaggtgtccgggggtctaggact

SEQ ID NO: 271960 - DNA, 25 bp, probe
tgcaatgtgtcccgggagtttgagt

SEQ ID NO: 271961 - DNA, 25 bp, probe
tgaatgttcctgtttgatgtgacag

SEQ ID NO: 271962 - DNA, 25 bp, probe
tgaattatcctgccttggatggact

SEQ ID NO: 271963 - DNA, 25 bp, probe
tgcattattcacactttcaaactgt

SEQ ID NO: 271964 - DNA, 25 bp, probe
tgcttatctgaaacttcccaacttc

SEQ ID NO: 271965 - DNA, 25 bp, probe
tgcttgtagcacacttcccaaaagt

SEQ ID NO: 271966 - DNA, 25 bp, probe
tgctaggggctacttctccaaaaaa

SEQ ID NO: 271967 - DNA, 25 bp, probe
tgcaaaggcgcagtgcttctctaca

SEQ ID NO: 271968 - DNA, 25 bp, probe
tgcaaaggcgcagtgcttctctaca

SEQ ID NO: 271969 - DNA, 25 bp, probe
tgcacgagcaagtttctcattactg

SEQ ID NO: 271970 - DNA, 25 bp, probe
tgcacgagcaagtttctcattactg

SEQ ID NO: 271971 - DNA, 25 bp, probe
tgcaaaaatcatcttcaccctgaca

SEQ ID NO: 271972 - DNA, 25 bp, probe
tgcaataatgcacttttcatacttg

SEQ ID NO: 271973 - DNA, 25 bp, probe
tgcttattcattatagctattcgtc

SEQ ID NO: 271974 - DNA, 25 bp, probe
tgcttttggagtcctattgtcgtgc

SEQ ID NO: 271975 - DNA, 25 bp, probe
tgcttctggggctgtgaaacgctca

SEQ ID NO: 271976 - DNA, 25 bp, probe
tgcacttgggggctcagcaaggcca

SEQ ID NO: 271977 - DNA, 25 bp, probe
tgcacacagggaggctgtagccagg

SEQ ID NO: 271978 - DNA, 25 bp, probe
tgcacagcatgctgacctatacctc

SEQ ID NO: 271979 - DNA, 25 bp, probe
tgaagcacaagttcatcacacgcta

SEQ ID NO: 271980 - DNA, 25 bp, probe
tgaagcacaagttcccatggctgtc

SEQ ID NO: 271981 - DNA, 25 bp, probe
tgaagcacaagttcccatggctgtc

SEQ ID NO: 271982 - DNA, 25 bp, probe
tgaagcacaagttcccatggctgtc

SEQ ID NO: 271983 - DNA, 25 bp, probe
tgaagcacgagaacgtcatcgggct

SEQ ID NO: 271984 - DNA, 25 bp, probe
tgcaacaaccagtagctcatggggc

SEQ ID NO: 271985 - DNA, 25 bp, probe
tgcacagattcccgactgtggcggt

SEQ ID NO: 271986 - DNA, 25 bp, probe
tgcacgatattcagatttcggcctt

SEQ ID NO: 271987 - DNA, 25 bp, probe
tgcatggatattcttttcgccttca

SEQ ID NO: 271988 - DNA, 25 bp, probe
tgcgtggaagtcatcttcaccctga

SEQ ID NO: 271989 - DNA, 25 bp, probe
tccaggtcagacacgttccactgac

SEQ ID NO: 271990 - DNA, 25 bp, probe
tgccaggtatacgcgttccctgtga

SEQ ID NO: 271991 - DNA, 25 bp, probe
tgcaggggaacaaaggtccttggga

SEQ ID NO: 271992 - DNA, 25 bp, probe
tgaagggacagccctgggtctaggg

SEQ ID NO: 271993 - DNA, 25 bp, probe
tgcattggagacgtccgttgtcctg

SEQ ID NO: 271994 - DNA, 25 bp, probe
tgcattggagacgtccgttgtcctg

SEQ ID NO: 271995 - DNA, 25 bp, probe
tgaagagacacagtctagaggtcct

SEQ ID NO: 271996 - DNA, 25 bp, probe
tgaagagcaacatcatagagtgtga

SEQ ID NO: 271997 - DNA, 25 bp, probe
tgaagcgggccctgatgatgatgaa

SEQ ID NO: 271998 - DNA, 25 bp, probe
tgaagctatggctctaaatgagaaa

SEQ ID NO: 271999 - DNA, 25 bp, probe
tgaagctcattcgccaggtggacaa

SEQ ID NO: 272000 - DNA, 25 bp, probe
tgaagagggctggccgtgtggactt

SEQ ID NO: 272001 - DNA, 25 bp, probe
tgaaggtgggcccagggctgactct

SEQ ID NO: 272002 - DNA, 25 bp, probe
tgaatgggttcccaggggccattgg

SEQ ID NO: 272003 - DNA, 25 bp, probe
tgaagagactaggcgctggggctca

SEQ ID NO: 272004 - DNA, 25 bp, probe
tgaagagcctcacctgggggcattt

SEQ ID NO: 272005 - DNA, 25 bp, probe
tgaaggctctgcagcacgagcggct

SEQ ID NO: 272006 - DNA, 25 bp, probe
tgaagctcctcaggcagtgcaggac

SEQ ID NO: 272007 - DNA, 25 bp, probe
tgaagctggctcaggtgcacatgcc

SEQ ID NO: 272008 - DNA, 25 bp, probe
tgcaaaggatcaagttcacatgttc

SEQ ID NO: 272009 - DNA, 25 bp, probe
tgcactaagacaagaacattctctc

SEQ ID NO: 272010 - DNA, 25 bp, probe
tgcagcccaacaactatcagttctg

SEQ ID NO: 272011 - DNA, 25 bp, probe
tgcacaccgagcactctcgggtgct

SEQ ID NO: 272012 - DNA, 25 bp, probe
tgcacaccgagcactctcgggtgct

SEQ ID NO: 272013 - DNA, 25 bp, probe
tgcaaccatagccttatggggagtg

SEQ ID NO: 272014 - DNA, 25 bp, probe
tgaatggcacaggccaaggggaggc

SEQ ID NO: 272015 - DNA, 25 bp, probe
tgaagacacaggccagagggtccct

SEQ ID NO: 272016 - DNA, 25 bp, probe
tgaagatgatggcaggaaggtctcc

SEQ ID NO: 272017 - DNA, 25 bp, probe
tgaaggaggcgtccgagagtgctcg

SEQ ID NO: 272018 - DNA, 25 bp, probe
tgaaggagtggaccctgatgctgca

SEQ ID NO: 272019 - DNA, 25 bp, probe
tgaagagtttgaccactatgtgcac

SEQ ID NO: 272020 - DNA, 25 bp, probe
tgaagcagcttcacactctgcatta

SEQ ID NO: 272021 - DNA, 25 bp, probe
tgcactcacttcacaaatttgaatt

SEQ ID NO: 272022 - DNA, 25 bp, probe
tgcaggttgcacacagttttgttta

SEQ ID NO: 272023 - DNA, 25 bp, probe
tgcacatttagttcagtgtttgttg

SEQ ID NO: 272024 - DNA, 25 bp, probe
tgcatcatactcttggagtttagtt

SEQ ID NO: 272025 - DNA, 25 bp, probe
tgaatatgtctttggctatgtatgt

SEQ ID NO: 272026 - DNA, 25 bp, probe
tgaatctatgacagagcaatgcttt

SEQ ID NO: 272027 - DNA, 25 bp, probe
tgaagacagagcagatcagtctttg

SEQ ID NO: 272028 - DNA, 25 bp, probe
tgcatccaagacttatcagtcttta

SEQ ID NO: 272029 - DNA, 25 bp, probe
tgcacctattgaaatatgtttaatg

SEQ ID NO: 272030 - DNA, 25 bp, probe
tgcactttgtgaaggatttctccaa

SEQ ID NO: 272031 - DNA, 25 bp, probe
tgcacttattaaccgtctgttgaat

SEQ ID NO: 272032 - DNA, 25 bp, probe
tgcagttttgcatggtgggttgtta

SEQ ID NO: 272033 - DNA, 25 bp, probe
tgcaatactttgggttggtttcttt

SEQ ID NO: 272034 - DNA, 25 bp, probe
tgcaatactttgggttggtttcttt

SEQ ID NO: 272035 - DNA, 25 bp, probe
tgcagtggcttacagcattttcttc

SEQ ID NO: 272036 - DNA, 25 bp, probe
tgcaatggccaaaagagttgttgct

SEQ ID NO: 272037 - DNA, 25 bp, probe
tgcaactgccagaacttggtattgt

SEQ ID NO: 272038 - DNA, 25 bp, probe
tgcaatctccatggcctctaagata

SEQ ID NO: 272039 - DNA, 25 bp, probe
tgcaatctccatggcctctaagata

SEQ ID NO: 272040 - DNA, 25 bp, probe
tgaattctcatctcaataaatgatg

SEQ ID NO: 272041 - DNA, 25 bp, probe
tcgatttcaacctaatgaccataag

SEQ ID NO: 272042 - DNA, 25 bp, probe
tgctggttaagcactcaggcctacg

SEQ ID NO: 272043 - DNA, 25 bp, probe
tgcagcgttgggaactaggccacct

SEQ ID NO: 272044 - DNA, 25 bp, probe
tgcaggagttggagtatggcccctc

SEQ ID NO: 272045 - DNA, 25 bp, probe
tgaagagcgtggagaatgcacccct

SEQ ID NO: 272046 - DNA, 25 bp, probe
tgaagtcacaggtgcaagcccacgt

SEQ ID NO: 272047 - DNA, 25 bp, probe
tgaatgtacacagcgaaccacagga

SEQ ID NO: 272048 - DNA, 25 bp, probe
tgaatgagaccacggagacccagag

SEQ ID NO: 272049 - DNA, 25 bp, probe
tgcttgaacccgggagacggaggtt

SEQ ID NO: 272050 - DNA, 25 bp, probe
tcttaaggcctggaaacgattttct

SEQ ID NO: 272051 - DNA, 25 bp, probe
tgctttaggcctggagactttcatt

SEQ ID NO: 272052 - DNA, 25 bp, probe
tctgtcaagactccgacacctgaac

SEQ ID NO: 272053 - DNA, 25 bp, probe
tctgagccagttcagtacctggagg

SEQ ID NO: 272054 - DNA, 25 bp, probe
tctgagccagttcagtacctggagg

SEQ ID NO: 272055 - DNA, 25 bp, probe
tctgagccagttcagtacctggagg

SEQ ID NO: 272056 - DNA, 25 bp, probe
tgcaacttgcttcagtcatcctgaa

SEQ ID NO: 272057 - DNA, 25 bp, probe
tgcacctacatatggtgctgcccaa

SEQ ID NO: 272058 - DNA, 25 bp, probe
tgcaagctcaaattcagttccctga

SEQ ID NO: 272059 - DNA, 25 bp, probe
tgcaagagcaaaatccgtccctagc

SEQ ID NO: 272060 - DNA, 25 bp, probe
tgcaagaggattaccggcaccttcc

SEQ ID NO: 272061 - DNA, 25 bp, probe
tgcagggcagattatgccaggcact

SEQ ID NO: 272062 - DNA, 25 bp, probe
tgaagagctgattgaggctgccaag

SEQ ID NO: 272063 - DNA, 25 bp, probe
tgaagacagtgtgtgcggcaagaac

SEQ ID NO: 272064 - DNA, 25 bp, probe
tgaagacgctgtacatgctgggcag

SEQ ID NO: 272065 - DNA, 25 bp, probe
tgaatgtactgaccagctgaggcag

SEQ ID NO: 272066 - DNA, 25 bp, probe
tgaatgtattgtacactgacgcgtc

SEQ ID NO: 272067 - DNA, 25 bp, probe
tgaagtcctgttactacagcctggc

SEQ ID NO: 272068 - DNA, 25 bp, probe
tgaagtgccttcatgcagacagact

SEQ ID NO: 272069 - DNA, 25 bp, probe
tgaagtgcacaagagcacgcaggcg

SEQ ID NO: 272070 - DNA, 25 bp, probe
tgaagtgctgacaagagacgcgaga

SEQ ID NO: 272071 - DNA, 25 bp, probe
tgaagttgacataccacctaacact

SEQ ID NO: 272072 - DNA, 25 bp, probe
tgaaggagaaagccagcctgaccct

SEQ ID NO: 272073 - DNA, 25 bp, probe
tgaagagagaaatgctcccctgcct

SEQ ID NO: 272074 - DNA, 25 bp, probe
tgcaaaaaagaagcctcctccttcc

SEQ ID NO: 272075 - DNA, 25 bp, probe
tgcaaaagaagaggtctccctcaat

SEQ ID NO: 272076 - DNA, 25 bp, probe
tgaataacaagccttctcctatcac

SEQ ID NO: 272077 - DNA, 25 bp, probe
tgaaggacaagcatactacataata

SEQ ID NO: 272078 - DNA, 25 bp, probe
tgcacaggtcaaagcgtctggaaaa

SEQ ID NO: 272079 - DNA, 25 bp, probe
tgcagcaggccgcggttgtagaaag

SEQ ID NO: 272080 - DNA, 25 bp, probe
tgcaggtgggggttgctgtataagt

SEQ ID NO: 272081 - DNA, 25 bp, probe
tgcaggggtgtgaggcccagggtgt

SEQ ID NO: 272082 - DNA, 25 bp, probe
tgcatcggagtgcaaccccaagtac

SEQ ID NO: 272083 - DNA, 25 bp, probe
tcaccgaggcgggcggtaagttcac

SEQ ID NO: 272084 - DNA, 25 bp, probe
tgcttgggacgggtggggaggtcac

SEQ ID NO: 272085 - DNA, 25 bp, probe
tgcaggggaagggctggctggggtc

SEQ ID NO: 272086 - DNA, 25 bp, probe
tgctggaaaagcggaggttggagcc

SEQ ID NO: 272087 - DNA, 25 bp, probe
tgcttattaacacagagggggccat

SEQ ID NO: 272088 - DNA, 25 bp, probe
tgctttaaacctaacggatatccta

SEQ ID NO: 272089 - DNA, 25 bp, probe
tcttcgaaagcctggaggctatttt

SEQ ID NO: 272090 - DNA, 25 bp, probe
tgcttatgggaggcgggaggcttta

SEQ ID NO: 272091 - DNA, 25 bp, probe
tgcactgcaggtagagggtgggcct

SEQ ID NO: 272092 - DNA, 25 bp, probe
tgcactggggggagggtgggcaggg

SEQ ID NO: 272093 - DNA, 25 bp, probe
tgcggccccgcggggaggaagaggg

SEQ ID NO: 272094 - DNA, 25 bp, probe
tgcggccccgcggggaggaagaggg

SEQ ID NO: 272095 - DNA, 25 bp, probe
tgcgaggtctacgtgggggacgagc

SEQ ID NO: 272096 - DNA, 25 bp, probe
tgcgaggtctacgtgggggacgagc

SEQ ID NO: 272097 - DNA, 25 bp, probe
tgctgggtcccgtggaggaaaccac

SEQ ID NO: 272098 - DNA, 25 bp, probe
tgctgggtcccgtggaggaaaccac

SEQ ID NO: 272099 - DNA, 25 bp, probe
tcgggtctcggaagggaagtagcca

SEQ ID NO: 272100 - DNA, 25 bp, probe
tcgggtttgtgagtgaggaagggca

SEQ ID NO: 272101 - DNA, 25 bp, probe
tcgggtttgtgagtgaggaagggca

SEQ ID NO: 272102 - DNA, 25 bp, probe
tccacgtcttgtctcaggagcggga

SEQ ID NO: 272103 - DNA, 25 bp, probe
tccaaggcattttagcggggagggg

SEQ ID NO: 272104 - DNA, 25 bp, probe
tccaaggtttgtctgcagttgaaga

SEQ ID NO: 272105 - DNA, 25 bp, probe
tccggattttatctcagaggagcaa

SEQ ID NO: 272106 - DNA, 25 bp, probe
tcctgccctttagatctgggcacca

SEQ ID NO: 272107 - DNA, 25 bp, probe
tgcactatgcctgtttttggggcca

SEQ ID NO: 272108 - DNA, 25 bp, probe
tgaattcctgctctgtgttaggcgc

SEQ ID NO: 272109 - DNA, 25 bp, probe
tgaatgtctctgttttgggaaggta

SEQ ID NO: 272110 - DNA, 25 bp, probe
tgaatgactctgtcttgtgggtgtc

SEQ ID NO: 272111 - DNA, 25 bp, probe
tgaagatctgtgactttggccttgc

SEQ ID NO: 272112 - DNA, 25 bp, probe
tgaagatctgtgactttggccttgc

SEQ ID NO: 272113 - DNA, 25 bp, probe
tgaagatcgcagacttcgggctggc

SEQ ID NO: 272114 - DNA, 25 bp, probe
tgaagatggcagacttcggtgtggc

SEQ ID NO: 272115 - DNA, 25 bp, probe
tgaagattatctacaccgtgggcca

SEQ ID NO: 272116 - DNA, 25 bp, probe
tgaagtggatggtccctttggcaca

SEQ ID NO: 272117 - DNA, 25 bp, probe
tgaagttgatgtgcccttgaatacc

SEQ ID NO: 272118 - DNA, 25 bp, probe
tgaagatgtattgcccgatgcaatg

SEQ ID NO: 272119 - DNA, 25 bp, probe
tgaaggtttccaacttgctcatgac

SEQ ID NO: 272120 - DNA, 25 bp, probe
tgcaaatggtgtgcaacttgcggga

SEQ ID NO: 272121 - DNA, 25 bp, probe
tgcaaccgctgtgaatgctgctgag

SEQ ID NO: 272122 - DNA, 25 bp, probe
tgcaacctctgtggcaagcgaggac

SEQ ID NO: 272123 - DNA, 25 bp, probe
tgcaaactgctgaccacgccgaatc

SEQ ID NO: 272124 - DNA, 25 bp, probe
tgcaaagtgtgagccgctggtctct

SEQ ID NO: 272125 - DNA, 25 bp, probe
tgcaaacggagacctcggtcatcta

SEQ ID NO: 272126 - DNA, 25 bp, probe
taacagcagggacaccgtttttatt

SEQ ID NO: 272127 - DNA, 25 bp, probe
tgaatacgtggaaacgttagtttgt

SEQ ID NO: 272128 - DNA, 25 bp, probe
tgaattggggattacagctgtcatg

SEQ ID NO: 272129 - DNA, 25 bp, probe
tgaagttgtagtcaatgcctatgaa

SEQ ID NO: 272130 - DNA, 25 bp, probe
tgaatatcggggtcattgccaatga

SEQ ID NO: 272131 - DNA, 25 bp, probe
tgaattcttggatgcagtggcagaa

SEQ ID NO: 272132 - DNA, 25 bp, probe
tgaattttcagctgaggctctgaga

SEQ ID NO: 272133 - DNA, 25 bp, probe
tgcaatctttcagcagcaacctgag

SEQ ID NO: 272134 - DNA, 25 bp, probe
tgcaatctttcagcagcaacctgag

SEQ ID NO: 272135 - DNA, 25 bp, probe
tgcaatgaagtagtcgacacctgtt

SEQ ID NO: 272136 - DNA, 25 bp, probe
tcagaaactaccggacttgttttct

SEQ ID NO: 272137 - DNA, 25 bp, probe
tgcataacctaccttgtcttttttt

SEQ ID NO: 272138 - DNA, 25 bp, probe
tgcaaaccaaatcttctctgtttca

SEQ ID NO: 272139 - DNA, 25 bp, probe
tgaagatccgagtgtgatttgaatt

SEQ ID NO: 272140 - DNA, 25 bp, probe
tgcacagatgctcagattggtttga

SEQ ID NO: 272141 - DNA, 25 bp, probe
tgctcatcactggagactgcgactg

SEQ ID NO: 272142 - DNA, 25 bp, probe
tgctgacaataacacaaaggccaat

SEQ ID NO: 272143 - DNA, 25 bp, probe
tgcttattagcctaaaatggcctga

SEQ ID NO: 272144 - DNA, 25 bp, probe
tgctatgattcaccaaaacaacttg

SEQ ID NO: 272145 - DNA, 25 bp, probe
tgcgatacgaccatcaacagagact

SEQ ID NO: 272146 - DNA, 25 bp, probe
tgcaacaccaccacagaagatgagg

SEQ ID NO: 272147 - DNA, 25 bp, probe
tgcacccagcctggccagaagtgca

SEQ ID NO: 272148 - DNA, 25 bp, probe
tgcaactggcctggccgcaacagca

SEQ ID NO: 272149 - DNA, 25 bp, probe
tgaagttggcatgtgcagacacagc

SEQ ID NO: 272150 - DNA, 25 bp, probe
tgaatttggatcagagactctctct

SEQ ID NO: 272151 - DNA, 25 bp, probe
tgaagtttagcaatatgacattctt

SEQ ID NO: 272152 - DNA, 25 bp, probe
tgcagcagctttcgaatcagacctg

SEQ ID NO: 272153 - DNA, 25 bp, probe
tgcagcagctttcgaatcagacctg

SEQ ID NO: 272154 - DNA, 25 bp, probe
tgcacacttcgggcacgcagaattg

SEQ ID NO: 272155 - DNA, 25 bp, probe
tgcacactgatttggcccagcattc

SEQ ID NO: 272156 - DNA, 25 bp, probe
tgcacatgagatatagatccgtaga

SEQ ID NO: 272157 - DNA, 25 bp, probe
tgcaagaagaaatctgagtcagcac

SEQ ID NO: 272158 - DNA, 25 bp, probe
tgcacagaggaaagcgggtgcccgg

SEQ ID NO: 272159 - DNA, 25 bp, probe
tgcaagtgtgactgctggcgtcttc

SEQ ID NO: 272160 - DNA, 25 bp, probe
tgcaagtgtgactgctggcgtcttc

SEQ ID NO: 272161 - DNA, 25 bp, probe
tgaatgctgtggttgtgctcaatgt

SEQ ID NO: 272162 - DNA, 25 bp, probe
tgcaacatgctttatggctcctgtc

SEQ ID NO: 272163 - DNA, 25 bp, probe
tgcaggctttccactgcctgtattg

SEQ ID NO: 272164 - DNA, 25 bp, probe
tgcacgcatttggataccttgtgat

SEQ ID NO: 272165 - DNA, 25 bp, probe
tgcactgcttggggaccattatgtg

SEQ ID NO: 272166 - DNA, 25 bp, probe
tgcacgtgctgaaagccgaggtaga

SEQ ID NO: 272167 - DNA, 25 bp, probe
tgcacctcttggctcgggtgcagag

SEQ ID NO: 272168 - DNA, 25 bp, probe
tgcacctcttggctcgggtgcagag

SEQ ID NO: 272169 - DNA, 25 bp, probe
tgcaatcactgtgctatcggcagat

SEQ ID NO: 272170 - DNA, 25 bp, probe
tgcacaccgtgcgtgctgggagatc

SEQ ID NO: 272171 - DNA, 25 bp, probe
tgcacaccgtgcgtgctgggagatc

SEQ ID NO: 272172 - DNA, 25 bp, probe
tgcaagctggtggctggaccaatgt

SEQ ID NO: 272173 - DNA, 25 bp, probe
tgcacatgcttgaactgtagtaatg

SEQ ID NO: 272174 - DNA, 25 bp, probe
tgcacctgtgctgggtgcgtagcgg

SEQ ID NO: 272175 - DNA, 25 bp, probe
tgcaccgtgtgcatgcgtggggtgt

SEQ ID NO: 272176 - DNA, 25 bp, probe
tgaatgcgcaggatgcggatggggc

SEQ ID NO: 272177 - DNA, 25 bp, probe
tgaatgcgaatttctggctttggga

SEQ ID NO: 272178 - DNA, 25 bp, probe
tgaatgcaacttctgtgccttgcct

SEQ ID NO: 272179 - DNA, 25 bp, probe
tgaatgcaacttctgtgccttgcct

SEQ ID NO: 272180 - DNA, 25 bp, probe
tgaatgcaacttctgtgccttgcct

SEQ ID NO: 272181 - DNA, 25 bp, probe
tgcactaacttcatgatgacccctt

SEQ ID NO: 272182 - DNA, 25 bp, probe
tgcagttgacttcaagacgctggct

SEQ ID NO: 272183 - DNA, 25 bp, probe
tgcagaaacttcgaggggctgagcg

SEQ ID NO: 272184 - DNA, 25 bp, probe
tgcagacttctttcgggacgaggca

SEQ ID NO: 272185 - DNA, 25 bp, probe
tgcaacgtcttactgattgggacag

SEQ ID NO: 272186 - DNA, 25 bp, probe
tgcaccgtcttgtagcatggttcca

SEQ ID NO: 272187 - DNA, 25 bp, probe
tgcagcccctagaagtggctttcac

SEQ ID NO: 272188 - DNA, 25 bp, probe
tgcaaccctgagaagttacttcaca

SEQ ID NO: 272189 - DNA, 25 bp, probe
tgctcaaccaggatttcactcttca

SEQ ID NO: 272190 - DNA, 25 bp, probe
tgctcaaccaggatttcactcttca

SEQ ID NO: 272191 - DNA, 25 bp, probe
tgcagagtaagtactttcacttgaa

SEQ ID NO: 272192 - DNA, 25 bp, probe
tgaatgtgaagttccccatcttggt

SEQ ID NO: 272193 - DNA, 25 bp, probe
tgaatgtgaagttccccatcttggt

SEQ ID NO: 272194 - DNA, 25 bp, probe
tgaatggaagaaacacactattggt

SEQ ID NO: 272195 - DNA, 25 bp, probe
tgaaggacagcatgacacctcctgg

SEQ ID NO: 272196 - DNA, 25 bp, probe
tgaaggaccacaaattcatcgcgcg

SEQ ID NO: 272197 - DNA, 25 bp, probe
tgaaggaccacaaattcatcgcgcg

SEQ ID NO: 272198 - DNA, 25 bp, probe
tgcaaggcagtcctttgaatctggg

SEQ ID NO: 272199 - DNA, 25 bp, probe
tgctaatgaggacattcgtccggaa

SEQ ID NO: 272200 - DNA, 25 bp, probe
tgcatggtaagacggtcagccgccg

SEQ ID NO: 272201 - DNA, 25 bp, probe
tgctagtaaacacaagaggacaggt

SEQ ID NO: 272202 - DNA, 25 bp, probe
tgctactaagtacaagctggattgt

SEQ ID NO: 272203 - DNA, 25 bp, probe
tgcaatttaacaccagagttttgtg

SEQ ID NO: 272204 - DNA, 25 bp, probe
tgcatattccatttacggtttggga

SEQ ID NO: 272205 - DNA, 25 bp, probe
tgcatttaagggagactctgggggc

SEQ ID NO: 272206 - DNA, 25 bp, probe
tgcattgtacgacaggactcaggtg

SEQ ID NO: 272207 - DNA, 25 bp, probe
tgcactgataaacatccatataaat

SEQ ID NO: 272208 - DNA, 25 bp, probe
tgcacgttcagacagctgcattgta

SEQ ID NO: 272209 - DNA, 25 bp, probe
tgcacttatcgagatgtgccattag

SEQ ID NO: 272210 - DNA, 25 bp, probe
tgcagctgtgcaggaggtggaggct

SEQ ID NO: 272211 - DNA, 25 bp, probe
tgcagctgtgcaggaggtggaggct

SEQ ID NO: 272212 - DNA, 25 bp, probe
tgcactgtgctgcaggggtgagccg

SEQ ID NO: 272213 - DNA, 25 bp, probe
tgcacgctctgatcaggggtgctgg

SEQ ID NO: 272214 - DNA, 25 bp, probe
tgcacaccagcaaaggcaactctgg

SEQ ID NO: 272215 - DNA, 25 bp, probe
tgcagaccaagagggaccctggagc

SEQ ID NO: 272216 - DNA, 25 bp, probe
tgcagccaagaacgttcccaggcag

SEQ ID NO: 272217 - DNA, 25 bp, probe
tgcagtcaagaaactaagccgtcct

SEQ ID NO: 272218 - DNA, 25 bp, probe
tgcagctcccagaaaacagaagttt

SEQ ID NO: 272219 - DNA, 25 bp, probe
tgcagcacttcactaccaaatgagc

SEQ ID NO: 272220 - DNA, 25 bp, probe
tgcagctgtatgagacctatcagag

SEQ ID NO: 272221 - DNA, 25 bp, probe
tgcagatgaatcagaccctgctgag

SEQ ID NO: 272222 - DNA, 25 bp, probe
tgaatcttctcttcacttgctgaga

SEQ ID NO: 272223 - DNA, 25 bp, probe
tgaatttgctatgcgttatggaatt

SEQ ID NO: 272224 - DNA, 25 bp, probe
tgaattagtcatgcagtcatatggc

SEQ ID NO: 272225 - DNA, 25 bp, probe
tgaatggtgtgccacgtcttggctc

SEQ ID NO: 272226 - DNA, 25 bp, probe
tgaatggattcccatctttgtctct

SEQ ID NO: 272227 - DNA, 25 bp, probe
tgaatggtctgtcattgtctgcctt

SEQ ID NO: 272228 - DNA, 25 bp, probe
tgcttcgacgtgtgtgtcatggctt

SEQ ID NO: 272229 - DNA, 25 bp, probe
tgcttcgaagcacgggacacatgtt

SEQ ID NO: 272230 - DNA, 25 bp, probe
tgcttcgaagcacgggacacatgtt

SEQ ID NO: 272231 - DNA, 25 bp, probe
tgctttcaagcatttgtaaacttaa

SEQ ID NO: 272232 - DNA, 25 bp, probe
tgcagtttcatctgtgaaaacgtga

SEQ ID NO: 272233 - DNA, 25 bp, probe
tgcacctaatgctgtgaaaaccgca

SEQ ID NO: 272234 - DNA, 25 bp, probe
tgcagtctgaaaagggaagaaacag

SEQ ID NO: 272235 - DNA, 25 bp, probe
tgcagtgggaaatggaagtgtgcaa

SEQ ID NO: 272236 - DNA, 25 bp, probe
tgcaggggaatctggcagtgcctct

SEQ ID NO: 272237 - DNA, 25 bp, probe
tgcaggtgtgcgtcaaggactactg

SEQ ID NO: 272238 - DNA, 25 bp, probe
tgcagggcttgaaatggacatctgt

SEQ ID NO: 272239 - DNA, 25 bp, probe
tgcaaggtataattgatggattctt

SEQ ID NO: 272240 - DNA, 25 bp, probe
tgaatcaggacaaagtggcttctgt

SEQ ID NO: 272241 - DNA, 25 bp, probe
tgaatgcaccaggctgagggttccc

SEQ ID NO: 272242 - DNA, 25 bp, probe
tgcacatccggatagaagattcccc

SEQ ID NO: 272243 - DNA, 25 bp, probe
tgcacatccggatagaagattcccc

SEQ ID NO: 272244 - DNA, 25 bp, probe
tgcacatccggatagaagattcccc

SEQ ID NO: 272245 - DNA, 25 bp, probe
tgcacatccggatagaagattcccc

SEQ ID NO: 272246 - DNA, 25 bp, probe
tgcacatccggatagaagattcccc

SEQ ID NO: 272247 - DNA, 25 bp, probe
tgcaaccaggtggtatcaggcccct

SEQ ID NO: 272248 - DNA, 25 bp, probe
tgcactgccgaagtgtagcggcccc

SEQ ID NO: 272249 - DNA, 25 bp, probe
tgcacctcagcaacggcagcgtgca

SEQ ID NO: 272250 - DNA, 25 bp, probe
tgcacaagagcacgcaggcgcttca

SEQ ID NO: 272251 - DNA, 25 bp, probe
tgcacaagagcacgcaggcgcttca

SEQ ID NO: 272252 - DNA, 25 bp, probe
tgcaatagtgaggcagactttcaat

SEQ ID NO: 272253 - DNA, 25 bp, probe
tgcaatcgctatgagtttctgaatg

SEQ ID NO: 272254 - DNA, 25 bp, probe
tgcagactgctagtgttctgtctaa

SEQ ID NO: 272255 - DNA, 25 bp, probe
tgcagactgctagtgttctgtctaa

SEQ ID NO: 272256 - DNA, 25 bp, probe
tgcagcatttacatctgccctaatc

SEQ ID NO: 272257 - DNA, 25 bp, probe
tgcagtgaagagctgcgccctggtt

SEQ ID NO: 272258 - DNA, 25 bp, probe
tgcagtgaagagctgcgccctggtt

SEQ ID NO: 272259 - DNA, 25 bp, probe
tgcagtgaagagctgcgccctggtt

SEQ ID NO: 272260 - DNA, 25 bp, probe
tgcagcgacacaagtgaccctgggc

SEQ ID NO: 272261 - DNA, 25 bp, probe
tgcacacccagggatgccctggacc

SEQ ID NO: 272262 - DNA, 25 bp, probe
tgcaaaccatacatggccattgagt

SEQ ID NO: 272263 - DNA, 25 bp, probe
tgcacaagcagatccggctgcaggt

SEQ ID NO: 272264 - DNA, 25 bp, probe
tgcagcaagacagctctgagcagct

SEQ ID NO: 272265 - DNA, 25 bp, probe
tgaaggcaccatgctgaagcggctc

SEQ ID NO: 272266 - DNA, 25 bp, probe
tgaaggcaccatgctgaagcggctc

SEQ ID NO: 272267 - DNA, 25 bp, probe
tgaaggccctgctccaggagatcaa

SEQ ID NO: 272268 - DNA, 25 bp, probe
tgaaggccctgctccaggagatcaa

SEQ ID NO: 272269 - DNA, 25 bp, probe
tatgtggtcgctgaccggaccgaat

SEQ ID NO: 272270 - DNA, 25 bp, probe
tatgtggtcgctgaccggaccgaat

SEQ ID NO: 272271 - DNA, 25 bp, probe
tgcagggatcgttacccgaactgca

SEQ ID NO: 272272 - DNA, 25 bp, probe
tgcaggggccattcaaccaaagcag

SEQ ID NO: 272273 - DNA, 25 bp, probe
tgcaccaggggtgcacaataaaggg

SEQ ID NO: 272274 - DNA, 25 bp, probe
tgcaccgagtgggcaactccaaaga

SEQ ID NO: 272275 - DNA, 25 bp, probe
tgcacggcaagggcatcattcacag

SEQ ID NO: 272276 - DNA, 25 bp, probe
tgcacgtcaagcgcatagcagcact

SEQ ID NO: 272277 - DNA, 25 bp, probe
tgcacgatcatcacctggtgcaccg

SEQ ID NO: 272278 - DNA, 25 bp, probe
tgcaaagcacaagctgggaccgcga

SEQ ID NO: 272279 - DNA, 25 bp, probe
tgcaaaggtctcttgaggagctgcc

SEQ ID NO: 272280 - DNA, 25 bp, probe
tgcagagaggtttcttggggtccca

SEQ ID NO: 272281 - DNA, 25 bp, probe
tgcaaagaggctgattgaggagtcc

SEQ ID NO: 272282 - DNA, 25 bp, probe
tgcagaaactgaggactaaagtcac

SEQ ID NO: 272283 - DNA, 25 bp, probe
tgcagaatttacctcaagaactctt

SEQ ID NO: 272284 - DNA, 25 bp, probe
tgcagaatttccccagaaacctgta

SEQ ID NO: 272285 - DNA, 25 bp, probe
tgcagcgatacccccaataaacgga

SEQ ID NO: 272286 - DNA, 25 bp, probe
tgcaggacttcccttataaagcaaa

SEQ ID NO: 272287 - DNA, 25 bp, probe
tgcaaatcttttacattaaggcaaa

SEQ ID NO: 272288 - DNA, 25 bp, probe
tgcacttttttataagagctaaagt

SEQ ID NO: 272289 - DNA, 25 bp, probe
tgcacttgctttgattgaatgtgga

SEQ ID NO: 272290 - DNA, 25 bp, probe
tgcatttcattcacagggatctggc

SEQ ID NO: 272291 - DNA, 25 bp, probe
tgctttctgtctcattgtactacgg

SEQ ID NO: 272292 - DNA, 25 bp, probe
tgctttctgtctcattgtactacgg

SEQ ID NO: 272293 - DNA, 25 bp, probe
tgctatccttagccttggaaactgc

SEQ ID NO: 272294 - DNA, 25 bp, probe
tgcttgcttctacctggcaaaacgt

SEQ ID NO: 272295 - DNA, 25 bp, probe
tgcaagcgatcctatctggaagccc

SEQ ID NO: 272296 - DNA, 25 bp, probe
tgcaatgtacaccatagtgactccc

SEQ ID NO: 272297 - DNA, 25 bp, probe
tgcaatgtacaccatagtgactccc

SEQ ID NO: 272298 - DNA, 25 bp, probe
tgaatgtgtgagcggctgcacctgc

SEQ ID NO: 272299 - DNA, 25 bp, probe
tgaatagctcaggtgtgctgacccc

SEQ ID NO: 272300 - DNA, 25 bp, probe
tgcagagcagtcaggctggacaccc

SEQ ID NO: 272301 - DNA, 25 bp, probe
tgcagagcagtcaggctggacaccc

SEQ ID NO: 272302 - DNA, 25 bp, probe
tgcatggcgtacctcatgaagacca

SEQ ID NO: 272303 - DNA, 25 bp, probe
tgcaggcctgtcctgataagcgcta

SEQ ID NO: 272304 - DNA, 25 bp, probe
tgcacggtttgtgagagcccagtca

SEQ ID NO: 272305 - DNA, 25 bp, probe
tgcacggtttgtgagagcccagtca

SEQ ID NO: 272306 - DNA, 25 bp, probe
tgaatggacttggagggggcgtgca

SEQ ID NO: 272307 - DNA, 25 bp, probe
tgcaaggacctgaagctgcgggctc

SEQ ID NO: 272308 - DNA, 25 bp, probe
tgcaagagcccttcgtgggagctgt

SEQ ID NO: 272309 - DNA, 25 bp, probe
tgcaaggcccttgtgggcacgagag

SEQ ID NO: 272310 - DNA, 25 bp, probe
tgcaaccactgcttcttgggaggag

SEQ ID NO: 272311 - DNA, 25 bp, probe
tgcaaccactgcttcttgggaggag

SEQ ID NO: 272312 - DNA, 25 bp, probe
tgcaaccactgcttcttgggaggag

SEQ ID NO: 272313 - DNA, 25 bp, probe
tgcacaccttgtgccactggaggag

SEQ ID NO: 272314 - DNA, 25 bp, probe
tgcacaccttgtgccactggaggag

SEQ ID NO: 272315 - DNA, 25 bp, probe
tgcacaccttgtgccactggaggag

SEQ ID NO: 272316 - DNA, 25 bp, probe
tgcacaccttgtgccactggaggag

SEQ ID NO: 272317 - DNA, 25 bp, probe
tgctctttttccctctggtggaaaa

SEQ ID NO: 272318 - DNA, 25 bp, probe
tgcactttttctcctctgttaaaaa

SEQ ID NO: 272319 - DNA, 25 bp, probe
tgcacttttgttcatgctccaaaga

SEQ ID NO: 272320 - DNA, 25 bp, probe
tgcacttttgttcatgctccaaaga

SEQ ID NO: 272321 - DNA, 25 bp, probe
tgcacatcatttaagtaggctaaaa

SEQ ID NO: 272322 - DNA, 25 bp, probe
tgcacactatggacttatggcttat

SEQ ID NO: 272323 - DNA, 25 bp, probe
tgcacactatggacttatggcttat

SEQ ID NO: 272324 - DNA, 25 bp, probe
tgcacactctgcgtctgtgattcat

SEQ ID NO: 272325 - DNA, 25 bp, probe
tgcagcagttggcctgcttgtctgg

SEQ ID NO: 272326 - DNA, 25 bp, probe
tgcatctggttggtctttattgagc

SEQ ID NO: 272327 - DNA, 25 bp, probe
tgcaatagctggctcctctatagga

SEQ ID NO: 272328 - DNA, 25 bp, probe
tgcaatagctggctcctctatagga

SEQ ID NO: 272329 - DNA, 25 bp, probe
tgcaatggcgctgacttctatggaa

SEQ ID NO: 272330 - DNA, 25 bp, probe
ccgaatgcatcaacttccgcaagtt

SEQ ID NO: 272331 - DNA, 25 bp, probe
tgcactagtctccatttctgggaag

SEQ ID NO: 272332 - DNA, 25 bp, probe
tgcttatttgacagatcgggaaact

SEQ ID NO: 272333 - DNA, 25 bp, probe
tgcacatgtttatcgaccggcacaa

SEQ ID NO: 272334 - DNA, 25 bp, probe
tgcacatgtttatcgaccggcacaa

SEQ ID NO: 272335 - DNA, 25 bp, probe
tgcatatttattacatcggggcaaa

SEQ ID NO: 272336 - DNA, 25 bp, probe
tgcatatttattacatcggggcaaa

SEQ ID NO: 272337 - DNA, 25 bp, probe
tgcaatttctatacctggctcataa

SEQ ID NO: 272338 - DNA, 25 bp, probe
tgcaattctctaggggccatcagga

SEQ ID NO: 272339 - DNA, 25 bp, probe
tgcaaagtctgagcaggttttgaag

SEQ ID NO: 272340 - DNA, 25 bp, probe
tgcaaagacccaagtgcaattggaa

SEQ ID NO: 272341 - DNA, 25 bp, probe
tgcaaaactcaacgatcagattcac

SEQ ID NO: 272342 - DNA, 25 bp, probe
tgcaaaagctacagacctgtctctg

SEQ ID NO: 272343 - DNA, 25 bp, probe
tgcagaaaccacacacactgttgct

SEQ ID NO: 272344 - DNA, 25 bp, probe
tgcacaagactcataccctgttttc

SEQ ID NO: 272345 - DNA, 25 bp, probe
tgcaaagctctttacctcttgctat

SEQ ID NO: 272346 - DNA, 25 bp, probe
tgcacatagctttatcaacttttaa

SEQ ID NO: 272347 - DNA, 25 bp, probe
tgcagatattcctaaagttttattg

SEQ ID NO: 272348 - DNA, 25 bp, probe
tgcagtgttgcccagtcaataaaat

SEQ ID NO: 272349 - DNA, 25 bp, probe
tgcagtgttgcccagtcaataaaat

SEQ ID NO: 272350 - DNA, 25 bp, probe
tgcagtttgactcttcatcgttcat

SEQ ID NO: 272351 - DNA, 25 bp, probe
tgcactgttactcttaattttaaag

SEQ ID NO: 272352 - DNA, 25 bp, probe
tgcacttgtcctgttttgtaaaata

SEQ ID NO: 272353 - DNA, 25 bp, probe
tgcatctggatggcgggatttttaa

SEQ ID NO: 272354 - DNA, 25 bp, probe
tgctcgtatggccctagcattacta

SEQ ID NO: 272355 - DNA, 25 bp, probe
tgctcaaaggccttaagtacatcca

SEQ ID NO: 272356 - DNA, 25 bp, probe
tgcacacatcaagagaaagttacca

SEQ ID NO: 272357 - DNA, 25 bp, probe
tgcagacacaaggaaacacatgaaa

SEQ ID NO: 272358 - DNA, 25 bp, probe
tgcagacacaaggaaacacatgaaa

SEQ ID NO: 272359 - DNA, 25 bp, probe
tgcagcaagagaacaaggtgctgaa

SEQ ID NO: 272360 - DNA, 25 bp, probe
tgcaacaggacaagaggtggccata

SEQ ID NO: 272361 - DNA, 25 bp, probe
tgcacacctatcacgtggagctcaa

SEQ ID NO: 272362 - DNA, 25 bp, probe
tgcagacaattcccgtggatgtgga

SEQ ID NO: 272363 - DNA, 25 bp, probe
tgcaagctaatgctcagcaggatgg

SEQ ID NO: 272364 - DNA, 25 bp, probe
tgcaggtgaacaccatcgcgagggc

SEQ ID NO: 272365 - DNA, 25 bp, probe
tgcaggtgaacaccatcgcgagggc

SEQ ID NO: 272366 - DNA, 25 bp, probe
tgcaggttatctgacctggggctgg

SEQ ID NO: 272367 - DNA, 25 bp, probe
tgcaggttatctgacctggggctgg

SEQ ID NO: 272368 - DNA, 25 bp, probe
tgcagtttttcacaatggtggcatc

SEQ ID NO: 272369 - DNA, 25 bp, probe
tgcagtgattcttctaatgatggtc

SEQ ID NO: 272370 - DNA, 25 bp, probe
tgcagaactctggcaatgagatttc

SEQ ID NO: 272371 - DNA, 25 bp, probe
tgcagaactctggcaatgagatttc

SEQ ID NO: 272372 - DNA, 25 bp, probe
tgcaacacgtggccaagcatgcctt

SEQ ID NO: 272373 - DNA, 25 bp, probe
tgaatgcagcctggacactggcctc

SEQ ID NO: 272374 - DNA, 25 bp, probe
tgaatgcagattccatcgctgagcc

SEQ ID NO: 272375 - DNA, 25 bp, probe
tgcaatgcaggcatcatcagggctc

SEQ ID NO: 272376 - DNA, 25 bp, probe
tgcacaggcagtgcagcagccgctg

SEQ ID NO: 272377 - DNA, 25 bp, probe
tgcagaggggcaggatgccgccgac

SEQ ID NO: 272378 - DNA, 25 bp, probe
tgcagatggaatccgagcagggcga

SEQ ID NO: 272379 - DNA, 25 bp, probe
tgcagcatgagttcctgccggagag

SEQ ID NO: 272380 - DNA, 25 bp, probe
tgcagcatgagttcctgccggagag

SEQ ID NO: 272381 - DNA, 25 bp, probe
tgcaatgcagcatgttgccctggca

SEQ ID NO: 272382 - DNA, 25 bp, probe
tgcaagaaatttctcttcaagcatc

SEQ ID NO: 272383 - DNA, 25 bp, probe
tgcatatgaaggactttttctactt

SEQ ID NO: 272384 - DNA, 25 bp, probe
tgcatgataaaagtttttctctctt

SEQ ID NO: 272385 - DNA, 25 bp, probe
tgcatgatccaatggcttactggcc

SEQ ID NO: 272386 - DNA, 25 bp, probe
tgcagactcagtagcgttttagtcg

SEQ ID NO: 272387 - DNA, 25 bp, probe
tgcatttactagattctagcaccgc

SEQ ID NO: 272388 - DNA, 25 bp, probe
tgcatttaccaagcacttccactgc

SEQ ID NO: 272389 - DNA, 25 bp, probe
tgcatttaccaagcacttccactgc

SEQ ID NO: 272390 - DNA, 25 bp, probe
tgcttgtttacagcactactctgtg

SEQ ID NO: 272391 - DNA, 25 bp, probe
tgcatggttcaaaccaccattctgt

SEQ ID NO: 272392 - DNA, 25 bp, probe
tgcagtctacaacttcaccaaattt

SEQ ID NO: 272393 - DNA, 25 bp, probe
tgcacttaaactcattccatatgca

SEQ ID NO: 272394 - DNA, 25 bp, probe
tgcactgtcaccataactcacaaga

SEQ ID NO: 272395 - DNA, 25 bp, probe
tgcacatgtccacccaaactaaaga

SEQ ID NO: 272396 - DNA, 25 bp, probe
tgcactgatcgctgccaatgcactc

SEQ ID NO: 272397 - DNA, 25 bp, probe
tgcactgatcgctgccaatgcactc

SEQ ID NO: 272398 - DNA, 25 bp, probe
tgcaatgctcgctggagaattgcca

SEQ ID NO: 272399 - DNA, 25 bp, probe
tgcaatgccgcctggtgatacagca

SEQ ID NO: 272400 - DNA, 25 bp, probe
tgcatctccgccaggctaaaagcct

SEQ ID NO: 272401 - DNA, 25 bp, probe
tgcttcaagccccgaaacacagcag

SEQ ID NO: 272402 - DNA, 25 bp, probe
tgcaacaagctcagaaacacacaga

SEQ ID NO: 272403 - DNA, 25 bp, probe
tgcaacattgtctcacctgaacgaa

SEQ ID NO: 272404 - DNA, 25 bp, probe
tgcaggcattactaaaagaaccacc

SEQ ID NO: 272405 - DNA, 25 bp, probe
tgcagggagttacaggagaccccga

SEQ ID NO: 272406 - DNA, 25 bp, probe
tgcgggaggtggaggaggcagccca

SEQ ID NO: 272407 - DNA, 25 bp, probe
tgcagtgatggtgcggggaggaccg

SEQ ID NO: 272408 - DNA, 25 bp, probe
tgcaagggaacagagagggacctgg

SEQ ID NO: 272409 - DNA, 25 bp, probe
tgcacgggcaacaaaggatgggact

SEQ ID NO: 272410 - DNA, 25 bp, probe
tgcacgtggccgagggcatggagta

SEQ ID NO: 272411 - DNA, 25 bp, probe
tgcacgtggcctcttgagcagtggc

SEQ ID NO: 272412 - DNA, 25 bp, probe
tgcacactggcagcacattccagct

SEQ ID NO: 272413 - DNA, 25 bp, probe
tgcactcagagcgcaagatccaccg

SEQ ID NO: 272414 - DNA, 25 bp, probe
tatctcaagctgacatgcaggccat

SEQ ID NO: 272415 - DNA, 25 bp, probe
tgcatctcgtggaagcggtcatccg

SEQ ID NO: 272416 - DNA, 25 bp, probe
tgcatctcgtggaagcggtcatccg

SEQ ID NO: 272417 - DNA, 25 bp, probe
tgcacggcagaatggttcccgtctg

SEQ ID NO: 272418 - DNA, 25 bp, probe
tgcacagtaggatgtggaacctgtt

SEQ ID NO: 272419 - DNA, 25 bp, probe
tccagtccttggataacctgtaccg

SEQ ID NO: 272420 - DNA, 25 bp, probe
tcaggtctttagaaacccctacgtg

SEQ ID NO: 272421 - DNA, 25 bp, probe
tcggtctttaggtgccacactgaga

SEQ ID NO: 272422 - DNA, 25 bp, probe
tcgttaataaagggcaacttagcca

SEQ ID NO: 272423 - DNA, 25 bp, probe
tcctataataaaatggcaccttccc

SEQ ID NO: 272424 - DNA, 25 bp, probe
tcctataaacattttcccttcatcc

SEQ ID NO: 272425 - DNA, 25 bp, probe
tagtaaagacaactgtggccccttc

SEQ ID NO: 272426 - DNA, 25 bp, probe
tgaatagtcagttacttggcacccc

SEQ ID NO: 272427 - DNA, 25 bp, probe
tgcaaagagcagctacctggcaact

SEQ ID NO: 272428 - DNA, 25 bp, probe
tgcaaacccttggccagtgcaagca

SEQ ID NO: 272429 - DNA, 25 bp, probe
tgcaaggcccacaggaggcaagcaa

SEQ ID NO: 272430 - DNA, 25 bp, probe
tgcagtggccccaaagatggcccac

SEQ ID NO: 272431 - DNA, 25 bp, probe
tgcaggaccacgatggatcctcggc

SEQ ID NO: 272432 - DNA, 25 bp, probe
tgcagctgagcggctgtatgggccc

SEQ ID NO: 272433 - DNA, 25 bp, probe
tgcagggtgctgcattgagggctcc

SEQ ID NO: 272434 - DNA, 25 bp, probe
tgcactggtctgcatttgggggcta

SEQ ID NO: 272435 - DNA, 25 bp, probe
tgcactggcctgttctgtaggagag

SEQ ID NO: 272436 - DNA, 25 bp, probe
tgcacttactggtcggaagagagaa

SEQ ID NO: 272437 - DNA, 25 bp, probe
tgcactactcggtgtgaatgaagaa

SEQ ID NO: 272438 - DNA, 25 bp, probe
tgcacccccagcctggaatgtaaat

SEQ ID NO: 272439 - DNA, 25 bp, probe
tgcaccaaccagcccgagattgtgc

SEQ ID NO: 272440 - DNA, 25 bp, probe
tgcaccaaccagcccgagattgtgc

SEQ ID NO: 272441 - DNA, 25 bp, probe
tgcaatcacaccatgccatgttttc

SEQ ID NO: 272442 - DNA, 25 bp, probe
tgcacaagactcacactatcttctc

SEQ ID NO: 272443 - DNA, 25 bp, probe
tgcacaagactcacactatcttctc

SEQ ID NO: 272444 - DNA, 25 bp, probe
tgcacgtatgcagtatcctatctct

SEQ ID NO: 272445 - DNA, 25 bp, probe
tgcagctgtgcagcttgctgctttc

SEQ ID NO: 272446 - DNA, 25 bp, probe
tgcagatgatatgtgctgcctttgc

SEQ ID NO: 272447 - DNA, 25 bp, probe
tgcaatctatgcttcagctgtcttt

SEQ ID NO: 272448 - DNA, 25 bp, probe
tgcactccatgagtgcagctctgga

SEQ ID NO: 272449 - DNA, 25 bp, probe
tgcactggctgacctatcatgagac

SEQ ID NO: 272450 - DNA, 25 bp, probe
tgcactggctgacctatcatgagac

SEQ ID NO: 272451 - DNA, 25 bp, probe
tgcagcttgctgctttcagctggag

SEQ ID NO: 272452 - DNA, 25 bp, probe
tgcatgatacatctgtggcagtgaa

SEQ ID NO: 272453 - DNA, 25 bp, probe
tgcatgatacatctgtggcagtgaa

SEQ ID NO: 272454 - DNA, 25 bp, probe
tgcagcttatgtaatagcagataaa

SEQ ID NO: 272455 - DNA, 25 bp, probe
tgcagttcagtttataagacaaaaa

SEQ ID NO: 272456 - DNA, 25 bp, probe
tcagttagtttttaggtcaagggct

SEQ ID NO: 272457 - DNA, 25 bp, probe
tcgggggtattttggtcacagggtg

SEQ ID NO: 272458 - DNA, 25 bp, probe
tctttgggttggaggctccaggagg

SEQ ID NO: 272459 - DNA, 25 bp, probe
tgctttggggggacaggccagaatg

SEQ ID NO: 272460 - DNA, 25 bp, probe
tgctttggggggacaggccagaatg

SEQ ID NO: 272461 - DNA, 25 bp, probe
tgcttttgggaggacttcattgacc

SEQ ID NO: 272462 - DNA, 25 bp, probe
tcggagttctatcacttgcttgacc

SEQ ID NO: 272463 - DNA, 25 bp, probe
tgcagggttgctgaacttcatggtc

SEQ ID NO: 272464 - DNA, 25 bp, probe
tgcagaggccttgagcttatcatgc

SEQ ID NO: 272465 - DNA, 25 bp, probe
tgcaaggagataggagctcatatct

SEQ ID NO: 272466 - DNA, 25 bp, probe
tgcatgggacaagaacatatgctgt

SEQ ID NO: 272467 - DNA, 25 bp, probe
tgcaaggagcctgacaagtgctgct

SEQ ID NO: 272468 - DNA, 25 bp, probe
tgcaaactgctggtccataagcgct

SEQ ID NO: 272469 - DNA, 25 bp, probe
tgcaccatctgtgtgctctacacag

SEQ ID NO: 272470 - DNA, 25 bp, probe
tgcacagatctgttttttcacactg

SEQ ID NO: 272471 - DNA, 25 bp, probe
tgcaagaggaattgatcagtatcac

SEQ ID NO: 272472 - DNA, 25 bp, probe
tgcaagatggattggccgcattgaa

SEQ ID NO: 272473 - DNA, 25 bp, probe
tgcacacattgttgaagctctggaa

SEQ ID NO: 272474 - DNA, 25 bp, probe
tgcaccgagtattggccggagagca

SEQ ID NO: 272475 - DNA, 25 bp, probe
tgcttgggcttctgcggtgaggcag

SEQ ID NO: 272476 - DNA, 25 bp, probe
tgcttggtctctgcgaagtcaaagg

SEQ ID NO: 272477 - DNA, 25 bp, probe
tgcattggaacttcttgattcaaag

SEQ ID NO: 272478 - DNA, 25 bp, probe
tgcattggaacttcttgattcaaag

SEQ ID NO: 272479 - DNA, 25 bp, probe
tgctctgaaatctcctttagccatc

SEQ ID NO: 272480 - DNA, 25 bp, probe
tgcttagtattgacactctctacca

SEQ ID NO: 272481 - DNA, 25 bp, probe
tgcattagtagaagccacctggcct

SEQ ID NO: 272482 - DNA, 25 bp, probe
tgcagaagtcagaagtaaccagaac

SEQ ID NO: 272483 - DNA, 25 bp, probe
tgctctaacgaattaccacaaacct

SEQ ID NO: 272484 - DNA, 25 bp, probe
tgcttgcaagcgacattcacaccga

SEQ ID NO: 272485 - DNA, 25 bp, probe
tgcaagaaggtcagcagcacccact

SEQ ID NO: 272486 - DNA, 25 bp, probe
tgcaagagaggcaatggagcacccc

SEQ ID NO: 272487 - DNA, 25 bp, probe
tgcacaaggtgcagcatgacctcaa

SEQ ID NO: 272488 - DNA, 25 bp, probe
tgcacaaggactggaactccaacca

SEQ ID NO: 272489 - DNA, 25 bp, probe
tgcacaaatgacatagacctcccca

SEQ ID NO: 272490 - DNA, 25 bp, probe
tgcatgcaacaaggttaccgccaca

SEQ ID NO: 272491 - DNA, 25 bp, probe
tgcaggaaagccatactgaatcaga

SEQ ID NO: 272492 - DNA, 25 bp, probe
tgcaggaagagcggctttgatatgt

SEQ ID NO: 272493 - DNA, 25 bp, probe
tgcagttaactggggtatcagctga

SEQ ID NO: 272494 - DNA, 25 bp, probe
tgcagtgaacctcgatggtgccagt

SEQ ID NO: 272495 - DNA, 25 bp, probe
tgcagtcttacatgattgtcctcat

SEQ ID NO: 272496 - DNA, 25 bp, probe
tgcagtcttacatgattgtcctcat

SEQ ID NO: 272497 - DNA, 25 bp, probe
tgcagctctgtttttctgcacactc

SEQ ID NO: 272498 - DNA, 25 bp, probe
tgctgattgaattttatgccccttg

SEQ ID NO: 272499 - DNA, 25 bp, probe
tcctttgagcctgaggcccttggta

SEQ ID NO: 272500 - DNA, 25 bp, probe
tccttctaccatcaaggccgggtga

SEQ ID NO: 272501 - DNA, 25 bp, probe
tgcactttcccatattgtgcctggg

SEQ ID NO: 272502 - DNA, 25 bp, probe
tgcacctctatgtcaggattaccag

SEQ ID NO: 272503 - DNA, 25 bp, probe
tgcaccgtagggcatgctgatacca

SEQ ID NO: 272504 - DNA, 25 bp, probe
gcatgcccacagcaaagacaccatg

SEQ ID NO: 272505 - DNA, 25 bp, probe
tgcacccatctgcggatggtactcc

SEQ ID NO: 272506 - DNA, 25 bp, probe
tgcaccaacagccgtatgtgtactg

SEQ ID NO: 272507 - DNA, 25 bp, probe
tgcatggtcgcccatgattttactg

SEQ ID NO: 272508 - DNA, 25 bp, probe
tgcatgattcttcttggtctactgt

SEQ ID NO: 272509 - DNA, 25 bp, probe
tgcgtcatcgtttgctatgtctacg

SEQ ID NO: 272510 - DNA, 25 bp, probe
tgcaatgcattgtatggctttataa

SEQ ID NO: 272511 - DNA, 25 bp, probe
tgcatatgcatagttcccatgttaa

SEQ ID NO: 272512 - DNA, 25 bp, probe
tgcattgccctatgcactgttagca

SEQ ID NO: 272513 - DNA, 25 bp, probe
tgcactgacccttccagacatagaa

SEQ ID NO: 272514 - DNA, 25 bp, probe
tgcactgacccttccagacatagaa

SEQ ID NO: 272515 - DNA, 25 bp, probe
tgcagtactctgatcgcaactaaac

SEQ ID NO: 272516 - DNA, 25 bp, probe
tgcagaacaataatttactatcaat

SEQ ID NO: 272517 - DNA, 25 bp, probe
tgcaaagcactgacttctaagtaaa

SEQ ID NO: 272518 - DNA, 25 bp, probe
tgcaagaggctggcttcttggtcaa

SEQ ID NO: 272519 - DNA, 25 bp, probe
tgcaggatggcatccttctggccac

SEQ ID NO: 272520 - DNA, 25 bp, probe
tgcagatgcaggttccttcagtcct

SEQ ID NO: 272521 - DNA, 25 bp, probe
tgcaagaggaggccttagctccatt

SEQ ID NO: 272522 - DNA, 25 bp, probe
tgcagcaggagacgacttactagat

SEQ ID NO: 272523 - DNA, 25 bp, probe
tgcaacgggctaatccacggaattg

SEQ ID NO: 272524 - DNA, 25 bp, probe
tgcaacgggctaatccacggaattg

SEQ ID NO: 272525 - DNA, 25 bp, probe
tgcaacgggtacttgcagggccttg

SEQ ID NO: 272526 - DNA, 25 bp, probe
tgcactggggtaccacatggtccat

SEQ ID NO: 272527 - DNA, 25 bp, probe
tgcactggggtaccacatggtccat

SEQ ID NO: 272528 - DNA, 25 bp, probe
tgcaatggtgtcaccacggccacat

SEQ ID NO: 272529 - DNA, 25 bp, probe
tgcacagggacactcacacaggcac

SEQ ID NO: 272530 - DNA, 25 bp, probe
tctggtcgtcttcaaggacctgagc

SEQ ID NO: 272531 - DNA, 25 bp, probe
tgctcggcttttgactggaccgagt

SEQ ID NO: 272532 - DNA, 25 bp, probe
tgcagcggcctacaaaggcacgcgg

SEQ ID NO: 272533 - DNA, 25 bp, probe
tgcagcggcctacaaaggcacgcgg

SEQ ID NO: 272534 - DNA, 25 bp, probe
tgcaaggctgaacaacagcccctgg

SEQ ID NO: 272535 - DNA, 25 bp, probe
tgcaagtctagacaactgctcccag

SEQ ID NO: 272536 - DNA, 25 bp, probe
tgcaagtctagacaactgctcccag

SEQ ID NO: 272537 - DNA, 25 bp, probe
tgcacgcctgggcaatttcagccag

SEQ ID NO: 272538 - DNA, 25 bp, probe
tgcacgtcagggacgctgttctcta

SEQ ID NO: 272539 - DNA, 25 bp, probe
tgcacagcaagctgtcggtgatcca

SEQ ID NO: 272540 - DNA, 25 bp, probe
tgctaccagtagtgggcactcaggt

SEQ ID NO: 272541 - DNA, 25 bp, probe
tgctaccagtagtgggcactcaggt

SEQ ID NO: 272542 - DNA, 25 bp, probe
tgcactccggagtcaagaactgagg

SEQ ID NO: 272543 - DNA, 25 bp, probe
tgcatttagcgagtctagaagaagg

SEQ ID NO: 272544 - DNA, 25 bp, probe
tgcagttggcaagctaactcgcggc

SEQ ID NO: 272545 - DNA, 25 bp, probe
tgcagaatgggagctaccgctgcaa

SEQ ID NO: 272546 - DNA, 25 bp, probe
tgcaacattcgcacacagtcctaca

SEQ ID NO: 272547 - DNA, 25 bp, probe
tgcatcatcatttgcttcaagcccc

SEQ ID NO: 272548 - DNA, 25 bp, probe
tgcatcttcatctatatcaagccct

SEQ ID NO: 272549 - DNA, 25 bp, probe
tgcactgtcatcgttatgctgaccc

SEQ ID NO: 272550 - DNA, 25 bp, probe
tgcactacacgatcatcatgagtcc

SEQ ID NO: 272551 - DNA, 25 bp, probe
tgcactacccagtcatcatgaacca

SEQ ID NO: 272552 - DNA, 25 bp, probe
tgcaccactccaacatcatgcatgt

SEQ ID NO: 272553 - DNA, 25 bp, probe
tgcacacagtatatcatctatgaag

SEQ ID NO: 272554 - DNA, 25 bp, probe
tgcacagagtgtacctcctgacagt

SEQ ID NO: 272555 - DNA, 25 bp, probe
tgcacagagtgtacctcctgacagt

SEQ ID NO: 272556 - DNA, 25 bp, probe
tgcatggaaatgtcctccaacaata

SEQ ID NO: 272557 - DNA, 25 bp, probe
tgcaaacacaaccatctacacacat

SEQ ID NO: 272558 - DNA, 25 bp, probe
tgcacaacactcctgatattcaaat

SEQ ID NO: 272559 - DNA, 25 bp, probe
tgcacacacgacctgtacatgatca

SEQ ID NO: 272560 - DNA, 25 bp, probe
tgcacacacgacctgtacatgatca

SEQ ID NO: 272561 - DNA, 25 bp, probe
tgcagcacagcgtctctgtaaaggt

SEQ ID NO: 272562 - DNA, 25 bp, probe
tgcagcacagcgtctctgtaaaggt

SEQ ID NO: 272563 - DNA, 25 bp, probe
tgcagactgcagggcttgaaatgga

SEQ ID NO: 272564 - DNA, 25 bp, probe
tgcagcacgtcgcttatattgggat

SEQ ID NO: 272565 - DNA, 25 bp, probe
tgcaccgtccattttctagggatag

SEQ ID NO: 272566 - DNA, 25 bp, probe
tgcaccgtccattttctagggatag

SEQ ID NO: 272567 - DNA, 25 bp, probe
tgcaacctgctttttgcatttaata

SEQ ID NO: 272568 - DNA, 25 bp, probe
tgcataccagtcttaccaattataa

SEQ ID NO: 272569 - DNA, 25 bp, probe
tgcagttattccactaaatgatgaa

SEQ ID NO: 272570 - DNA, 25 bp, probe
tgcagttattccactaaatgatgaa

SEQ ID NO: 272571 - DNA, 25 bp, probe
tgccttcaacccattaaacaacact

SEQ ID NO: 272572 - DNA, 25 bp, probe
tgctcttgaagcccccaagtaagaa

SEQ ID NO: 272573 - DNA, 25 bp, probe
tgctccggacacccgaaggcaataa

SEQ ID NO: 272574 - DNA, 25 bp, probe
tgcacccaggacccggatgtaatca

SEQ ID NO: 272575 - DNA, 25 bp, probe
tgcacccaggacccggatgtaatca

SEQ ID NO: 272576 - DNA, 25 bp, probe
tgcttccaaacagctgggtttaaat

SEQ ID NO: 272577 - DNA, 25 bp, probe
tgcttcctaaaggtattttcaccct

SEQ ID NO: 272578 - DNA, 25 bp, probe
tgctgtcagttatgggcttattgcc

SEQ ID NO: 272579 - DNA, 25 bp, probe
tgctatgcgttatggaattgaatcc

SEQ ID NO: 272580 - DNA, 25 bp, probe
tgcttggcgtgtgggaatccaccct

SEQ ID NO: 272581 - DNA, 25 bp, probe
tgcagggcgtttacaaccagccacc

SEQ ID NO: 272582 - DNA, 25 bp, probe
tgcagggcgtttacaaccagccacc

SEQ ID NO: 272583 - DNA, 25 bp, probe
tgcacgaggttttcacctatggcca

SEQ ID NO: 272584 - DNA, 25 bp, probe
tgcacgaggttttcacctatggcca

SEQ ID NO: 272585 - DNA, 25 bp, probe
tgcaggaggttatcggcagtggagc

SEQ ID NO: 272586 - DNA, 25 bp, probe
tgcatggccctcagggacagtgagg

SEQ ID NO: 272587 - DNA, 25 bp, probe
tgcagcccacactgctggacatgga

SEQ ID NO: 272588 - DNA, 25 bp, probe
tgcagcccacactgctggacatgga

SEQ ID NO: 272589 - DNA, 25 bp, probe
tgcacatccactgtgctggccaaga

SEQ ID NO: 272590 - DNA, 25 bp, probe
tgcactccagcctgggcgacagagc

SEQ ID NO: 272591 - DNA, 25 bp, probe
tgcactccagcctggtgacagagtg

SEQ ID NO: 272592 - DNA, 25 bp, probe
tccagcaagcacagatgtacaggta

SEQ ID NO: 272593 - DNA, 25 bp, probe
tgcagaacaccaacatgctgaaggt

SEQ ID NO: 272594 - DNA, 25 bp, probe
tgcaaaatccgcgaggggcgcttct

SEQ ID NO: 272595 - DNA, 25 bp, probe
tgcaaatattcgccaaggagcctcc

SEQ ID NO: 272596 - DNA, 25 bp, probe
tgcaactgttgctgataagatcctg

SEQ ID NO: 272597 - DNA, 25 bp, probe
tgcgactgtagggtgggtcctggat

SEQ ID NO: 272598 - DNA, 25 bp, probe
tgcgactgtagggtgggtcctggat

SEQ ID NO: 272599 - DNA, 25 bp, probe
tgcagaagtgttggctgggtgctct

SEQ ID NO: 272600 - DNA, 25 bp, probe
tgcacaagtgttgtgtcgtgcagtg

SEQ ID NO: 272601 - DNA, 25 bp, probe
tgcaaagtgaggcttctgggtgcat

SEQ ID NO: 272602 - DNA, 25 bp, probe
tgcagagcgtggttgtatctggggc

SEQ ID NO: 272603 - DNA, 25 bp, probe
tgctatgccgagttcttctacaact

SEQ ID NO: 272604 - DNA, 25 bp, probe
tgctatgccgagttcttctacaact

SEQ ID NO: 272605 - DNA, 25 bp, probe
tgcatgaactggtccgccattacac

SEQ ID NO: 272606 - DNA, 25 bp, probe
tgcatgaactggtccgccattacac

SEQ ID NO: 272607 - DNA, 25 bp, probe
tgctcaacaggtgaccttacaggct

SEQ ID NO: 272608 - DNA, 25 bp, probe
tgcatgccagtaatgtattttacag

SEQ ID NO: 272609 - DNA, 25 bp, probe
tgcagacaagatagatttccccaga

SEQ ID NO: 272610 - DNA, 25 bp, probe
tgcaaaatatgttatgtctccagag

SEQ ID NO: 272611 - DNA, 25 bp, probe
tgctaaatatggtcgttactatttt

SEQ ID NO: 272612 - DNA, 25 bp, probe
tgctaaatactgtacatagatgtat

SEQ ID NO: 272613 - DNA, 25 bp, probe
tgctattacctttctcagttaccag

SEQ ID NO: 272614 - DNA, 25 bp, probe
tgcatttatggcacctgaggtacta

SEQ ID NO: 272615 - DNA, 25 bp, probe
tgcatcatcttgtcggccatgcagt

SEQ ID NO: 272616 - DNA, 25 bp, probe
tgcatactcttgggaagcagcttcc

SEQ ID NO: 272617 - DNA, 25 bp, probe
tgccctcaatctagaacgctacaca

SEQ ID NO: 272618 - DNA, 25 bp, probe
tgcactctgcagttagacaccatta

SEQ ID NO: 272619 - DNA, 25 bp, probe
tgcagtgctggaaatagatctcatt

SEQ ID NO: 272620 - DNA, 25 bp, probe
tgcagtcaaggattcttcattttta

SEQ ID NO: 272621 - DNA, 25 bp, probe
tgcagtcaaggattcttcattttta

SEQ ID NO: 272622 - DNA, 25 bp, probe
tgcagagcaataacactatatttat

SEQ ID NO: 272623 - DNA, 25 bp, probe
tgcacagcagtcaaagccatctctt

SEQ ID NO: 272624 - DNA, 25 bp, probe
tgcacagatgctgccagctctggct

SEQ ID NO: 272625 - DNA, 25 bp, probe
tgcagccgctgctggctatggctgc

SEQ ID NO: 272626 - DNA, 25 bp, probe
tgcagccgatatagagtcattatgt

SEQ ID NO: 272627 - DNA, 25 bp, probe
tgctgccgttaactttgtgtctcgg

SEQ ID NO: 272628 - DNA, 25 bp, probe
tgctgccgttaactttgtgtctcgg

SEQ ID NO: 272629 - DNA, 25 bp, probe
tcgtcctgtaatctgtttctaggtg

SEQ ID NO: 272630 - DNA, 25 bp, probe
tcgtcttatattagggaattagggg

SEQ ID NO: 272631 - DNA, 25 bp, probe
tgctctttaacccggacgtgccggg

SEQ ID NO: 272632 - DNA, 25 bp, probe
tgctctttaacctggtctactgggt

SEQ ID NO: 272633 - DNA, 25 bp, probe
tgctctttaacctggtctactgggt

SEQ ID NO: 272634 - DNA, 25 bp, probe
tgcttttaactctggtaaagtggat

SEQ ID NO: 272635 - DNA, 25 bp, probe
tgcttttggaactcaggaaatggta

SEQ ID NO: 272636 - DNA, 25 bp, probe
tgctttccgaactctggtgggggat

SEQ ID NO: 272637 - DNA, 25 bp, probe
tgctttcttctacacgggggagcgc

SEQ ID NO: 272638 - DNA, 25 bp, probe
tgctaagtattttgacagggccgtc

SEQ ID NO: 272639 - DNA, 25 bp, probe
tgctaatgtttgagacgatggcagg

SEQ ID NO: 272640 - DNA, 25 bp, probe
tgctaagtttccaagcagtaaacta

SEQ ID NO: 272641 - DNA, 25 bp, probe
tgctaggttttcatcagacgtactt

SEQ ID NO: 272642 - DNA, 25 bp, probe
tgctagagcttactctgagaaggtg

SEQ ID NO: 272643 - DNA, 25 bp, probe
tgcatcggttcctggcagaggatgc

SEQ ID NO: 272644 - DNA, 25 bp, probe
tgctcaatgcattccaggtaagtcc

SEQ ID NO: 272645 - DNA, 25 bp, probe
tgctccaccatcagagaactgtccc

SEQ ID NO: 272646 - DNA, 25 bp, probe
tgctccaccatcagagaactgtccc

SEQ ID NO: 272647 - DNA, 25 bp, probe
tgcacccctaaaagtcttgctccaa

SEQ ID NO: 272648 - DNA, 25 bp, probe
tgcacccctaaaagtcttgctccaa

SEQ ID NO: 272649 - DNA, 25 bp, probe
tgccctttggactgtcaggtccaag

SEQ ID NO: 272650 - DNA, 25 bp, probe
tgcacaggttaaccgtcagacttcc

SEQ ID NO: 272651 - DNA, 25 bp, probe
tgcacaaactcagccggaggcgtcc

SEQ ID NO: 272652 - DNA, 25 bp, probe
tgcacagaacgcccgggggctgagc

SEQ ID NO: 272653 - DNA, 25 bp, probe
tgcagagcataacccggaggggccc

SEQ ID NO: 272654 - DNA, 25 bp, probe
tgcagatatcaaagggacagggtcc

SEQ ID NO: 272655 - DNA, 25 bp, probe
tgcaggaacacgagacaggccggcg

SEQ ID NO: 272656 - DNA, 25 bp, probe
tgcaggcctttgagaatggccgagc

SEQ ID NO: 272657 - DNA, 25 bp, probe
tgcagggtttgatgatatggtggaa

SEQ ID NO: 272658 - DNA, 25 bp, probe
tgcacgcgctttaagtgtgctgggc

SEQ ID NO: 272659 - DNA, 25 bp, probe
tgcacctctcctcagaggcatggac

SEQ ID NO: 272660 - DNA, 25 bp, probe
tgcacctctcctcagaggcatggac

SEQ ID NO: 272661 - DNA, 25 bp, probe
tgcacctggcaccaagcggaaaata

SEQ ID NO: 272662 - DNA, 25 bp, probe
tgcagccagtcagaagctggagagg

SEQ ID NO: 272663 - DNA, 25 bp, probe
tgcagtcactcgtcagacctgcagg

SEQ ID NO: 272664 - DNA, 25 bp, probe
tgctatttcctaacctgcaggcaga

SEQ ID NO: 272665 - DNA, 25 bp, probe
tgcatttttgtaacactgagtctat

SEQ ID NO: 272666 - DNA, 25 bp, probe
tgcttgtggatttatagtagttcag

SEQ ID NO: 272667 - DNA, 25 bp, probe
tgcttagttttttctagttagtgtt

SEQ ID NO: 272668 - DNA, 25 bp, probe
tgcttattgttttgtttattttatt

SEQ ID NO: 272669 - DNA, 25 bp, probe
tgctttttccagagttatttatacc

SEQ ID NO: 272670 - DNA, 25 bp, probe
tgcttttctccacttggtttggaaa

SEQ ID NO: 272671 - DNA, 25 bp, probe
tgctatttgtaacttggggatggtc

SEQ ID NO: 272672 - DNA, 25 bp, probe
tgctattcgtcctgtaggtgctgtg

SEQ ID NO: 272673 - DNA, 25 bp, probe
tcgttggtccggatggtctagtcta

SEQ ID NO: 272674 - DNA, 25 bp, probe
tgctttggttctgggttgtttccta

SEQ ID NO: 272675 - DNA, 25 bp, probe
tgcacactgcacacggtgtctgttt

SEQ ID NO: 272676 - DNA, 25 bp, probe
tgcacctgcacctttgttgaattgt

SEQ ID NO: 272677 - DNA, 25 bp, probe
tgcagcactatcagtatgttgaatt

SEQ ID NO: 272678 - DNA, 25 bp, probe
tgcagactctctgccagtacacatt

SEQ ID NO: 272679 - DNA, 25 bp, probe
tgcagagtcttcggcagaagcactt

SEQ ID NO: 272680 - DNA, 25 bp, probe
tgcaggtctcattggaaccacattt

SEQ ID NO: 272681 - DNA, 25 bp, probe
tgcaggtctcattggaaccacattt

SEQ ID NO: 272682 - DNA, 25 bp, probe
tgcaggagctctatgaacgccttcg

SEQ ID NO: 272683 - DNA, 25 bp, probe
tgcaggagctctatgaacgccttcg

SEQ ID NO: 272684 - DNA, 25 bp, probe
tgcaggtgctcatggacctgcctct

SEQ ID NO: 272685 - DNA, 25 bp, probe
tgcaggtccatcctgacctggtatg

SEQ ID NO: 272686 - DNA, 25 bp, probe
tgcaggtggacagggactggaatgg

SEQ ID NO: 272687 - DNA, 25 bp, probe
tgcaggtcgactcggccgagtatgg

SEQ ID NO: 272688 - DNA, 25 bp, probe
tgcaggcctggactggcgagatttt

SEQ ID NO: 272689 - DNA, 25 bp, probe
tgcaggcctggactggcgagatttt

SEQ ID NO: 272690 - DNA, 25 bp, probe
tgcgtcctgcagaatgggagctacc

SEQ ID NO: 272691 - DNA, 25 bp, probe
tgcttcttgagtagagccaccacca

SEQ ID NO: 272692 - DNA, 25 bp, probe
tgcttcatcacgttgactaccattg

SEQ ID NO: 272693 - DNA, 25 bp, probe
tgcttcatcacgttgactaccattg

SEQ ID NO: 272694 - DNA, 25 bp, probe
tgcttctgtcggaactcattgctga

SEQ ID NO: 272695 - DNA, 25 bp, probe
tgcattattaagatctctcctgatt

SEQ ID NO: 272696 - DNA, 25 bp, probe
tgcttttaagcaggcgtttgatgaa

SEQ ID NO: 272697 - DNA, 25 bp, probe
tgctggatgctacacggttatatat

SEQ ID NO: 272698 - DNA, 25 bp, probe
tcggagccatcatcgcgccaaattt

SEQ ID NO: 272699 - DNA, 25 bp, probe
tgcaggagagtttcagggacaatta

SEQ ID NO: 272700 - DNA, 25 bp, probe
tgcagtggagtgtggtggccagtgg

SEQ ID NO: 272701 - DNA, 25 bp, probe
tgcaggcggtatccagaggtgaggg

SEQ ID NO: 272702 - DNA, 25 bp, probe
tgcaggaggtcacaaggttggcttg

SEQ ID NO: 272703 - DNA, 25 bp, probe
tgcaggacttgcacacagggaggct

SEQ ID NO: 272704 - DNA, 25 bp, probe
tgcagtcaccatctcagagggggcc

SEQ ID NO: 272705 - DNA, 25 bp, probe
tgcagccccttttggctgaggctga

SEQ ID NO: 272706 - DNA, 25 bp, probe
tgcagccccttttggctgaggctga

SEQ ID NO: 272707 - DNA, 25 bp, probe
tgcacccgctactgcaggagatcta

SEQ ID NO: 272708 - DNA, 25 bp, probe
tgcaccctcacctgatgcaggaaca

SEQ ID NO: 272709 - DNA, 25 bp, probe
tgcaccgcgacctcaagtgcgaaaa

SEQ ID NO: 272710 - DNA, 25 bp, probe
tgcaccgcgacctcaagtgcgaaaa

SEQ ID NO: 272711 - DNA, 25 bp, probe
tgcacctggacctgaggtccgagaa

SEQ ID NO: 272712 - DNA, 25 bp, probe
tgcacttgaaggtgacctcccagaa

SEQ ID NO: 272713 - DNA, 25 bp, probe
tgcactctaaggagatcatctacag

SEQ ID NO: 272714 - DNA, 25 bp, probe
tgcacttacaggcgtttcgagctga

SEQ ID NO: 272715 - DNA, 25 bp, probe
tgcagtaaaggttgtcttcaactga

SEQ ID NO: 272716 - DNA, 25 bp, probe
tgcagctgaaatcggattcgtcccg

SEQ ID NO: 272717 - DNA, 25 bp, probe
tgcactggagttctatgctctcgca

SEQ ID NO: 272718 - DNA, 25 bp, probe
tgcactgcgggggatgtgatgctcg

SEQ ID NO: 272719 - DNA, 25 bp, probe
tgcagctgctggcatggagtacctg

SEQ ID NO: 272720 - DNA, 25 bp, probe
tgcactgggctcttcagcaaacatg

SEQ ID NO: 272721 - DNA, 25 bp, probe
tgcagcccgtgctaacatgaaatgc

SEQ ID NO: 272722 - DNA, 25 bp, probe
tgcaccggcagaaagcagatgaagc

SEQ ID NO: 272723 - DNA, 25 bp, probe
tgcacccagagggagcagtgaggca

SEQ ID NO: 272724 - DNA, 25 bp, probe
tgcagaccggcgaggagggcatgcc

SEQ ID NO: 272725 - DNA, 25 bp, probe
tgctacgtggtgaaggacagcgcgc

SEQ ID NO: 272726 - DNA, 25 bp, probe
tgcataccggatacagatacccaaa

SEQ ID NO: 272727 - DNA, 25 bp, probe
tgctcacactgtatggaacccacat

SEQ ID NO: 272728 - DNA, 25 bp, probe
tgctcaaggaactgaagcaccccaa

SEQ ID NO: 272729 - DNA, 25 bp, probe
tgcacatagagatatttgggaccca

SEQ ID NO: 272730 - DNA, 25 bp, probe
tgcatcaagaaggcctcgggcccca

SEQ ID NO: 272731 - DNA, 25 bp, probe
tgcatcaagaaggcctcgggcccca

SEQ ID NO: 272732 - DNA, 25 bp, probe
tgctgaccaaatgcctggtaccaga

SEQ ID NO: 272733 - DNA, 25 bp, probe
tgctgccacagtagacctagttcca

SEQ ID NO: 272734 - DNA, 25 bp, probe
tgctcgagggagccatcaacttcca

SEQ ID NO: 272735 - DNA, 25 bp, probe
tgcatggggaagcacttcctccact

SEQ ID NO: 272736 - DNA, 25 bp, probe
tgcatggggaagcacttcctccact

SEQ ID NO: 272737 - DNA, 25 bp, probe
tgcggtggaaagggcatcaaccctg

SEQ ID NO: 272738 - DNA, 25 bp, probe
tcggtacttaggacttgatcctgtg

SEQ ID NO: 272739 - DNA, 25 bp, probe
tgcggccaattgtgtctaatcggtg

SEQ ID NO: 272740 - DNA, 25 bp, probe
tgcagggactcgtgtcctggggaga

SEQ ID NO: 272741 - DNA, 25 bp, probe
tgcctattgtcggggccggagggag

SEQ ID NO: 272742 - DNA, 25 bp, probe
tgcctattgtcggggccggagggag

SEQ ID NO: 272743 - DNA, 25 bp, probe
tgccttagtccttgggctgggggag

SEQ ID NO: 272744 - DNA, 25 bp, probe
tgcttccagctagagcttcgggggg

SEQ ID NO: 272745 - DNA, 25 bp, probe
tgcttccagctagagcttcgggggg

SEQ ID NO: 272746 - DNA, 25 bp, probe
tgcttccagctagagcttcgggggg

SEQ ID NO: 272747 - DNA, 25 bp, probe
tgcttccaggggttctggcgggagt

SEQ ID NO: 272748 - DNA, 25 bp, probe
tgcatacagatccaggaagcggctg

SEQ ID NO: 272749 - DNA, 25 bp, probe
tgcagacgccgagatgactggctac

SEQ ID NO: 272750 - DNA, 25 bp, probe
tgcacgcgcgctacactgactggct

SEQ ID NO: 272751 - DNA, 25 bp, probe
tgcaggacgtgtccatcactgtgct

SEQ ID NO: 272752 - DNA, 25 bp, probe
tgcaggagtcgtgcatcgcgtgata

SEQ ID NO: 272753 - DNA, 25 bp, probe
tgcaggattcgttcacgttcttgta

SEQ ID NO: 272754 - DNA, 25 bp, probe
tgcaggattcgttcacgttcttgta

SEQ ID NO: 272755 - DNA, 25 bp, probe
tgcttgagtcttaccgtaattgata

SEQ ID NO: 272756 - DNA, 25 bp, probe
tctagaatatttgcctaattgggaa

SEQ ID NO: 272757 - DNA, 25 bp, probe
tgctagtttgttttctacatttgaa

SEQ ID NO: 272758 - DNA, 25 bp, probe
tgctagtttgttttctacatttgaa

SEQ ID NO: 272759 - DNA, 25 bp, probe
tgcaggatttgtcagtctctttaga

SEQ ID NO: 272760 - DNA, 25 bp, probe
tgcttttctggttgtgccatttaaa

SEQ ID NO: 272761 - DNA, 25 bp, probe
tgcttttctggttgtgccatttaaa

SEQ ID NO: 272762 - DNA, 25 bp, probe
tgcttttctggtttataactactaa

SEQ ID NO: 272763 - DNA, 25 bp, probe
tgctttcttgggttaatccatgttc

SEQ ID NO: 272764 - DNA, 25 bp, probe
tgcttttggtggatctcacctcttt

SEQ ID NO: 272765 - DNA, 25 bp, probe
tgctatagggttttctctcactgtt

SEQ ID NO: 272766 - DNA, 25 bp, probe
tgcattatgtggactgaaccgactt

SEQ ID NO: 272767 - DNA, 25 bp, probe
tgcagcctgtggatgtcctgcagcc

SEQ ID NO: 272768 - DNA, 25 bp, probe
tgcagcggctggaggacagagcccg

SEQ ID NO: 272769 - DNA, 25 bp, probe
tgcagggcttgctggagaggcctcg

SEQ ID NO: 272770 - DNA, 25 bp, probe
tgcagtacaatctggagctggcctt

SEQ ID NO: 272771 - DNA, 25 bp, probe
tgcttgcatttctagcgagctggcg

SEQ ID NO: 272772 - DNA, 25 bp, probe
tgctagctttgccatgtcatctgga

SEQ ID NO: 272773 - DNA, 25 bp, probe
tgctacatcatgaagcattacagga

SEQ ID NO: 272774 - DNA, 25 bp, probe
tgcattcatcagtcacatgggaaca

SEQ ID NO: 272775 - DNA, 25 bp, probe
tgcataatcaatgctggctgataat

SEQ ID NO: 272776 - DNA, 25 bp, probe
tgctcacatccaagctgtgcttagc

SEQ ID NO: 272777 - DNA, 25 bp, probe
tgcgacatgctcaagattgcctcca

SEQ ID NO: 272778 - DNA, 25 bp, probe
tgcgacatgctcaagattgcctcca

SEQ ID NO: 272779 - DNA, 25 bp, probe
tgctgcagcatttacatctgcccta

SEQ ID NO: 272780 - DNA, 25 bp, probe
tgcttcatttacaagcctcaagatg

SEQ ID NO: 272781 - DNA, 25 bp, probe
tgctttttatgctcacacaacagtt

SEQ ID NO: 272782 - DNA, 25 bp, probe
tgcttgttcaggcacgccagaagga

SEQ ID NO: 272783 - DNA, 25 bp, probe
tgcttgtgtacaaacccagattgaa

SEQ ID NO: 272784 - DNA, 25 bp, probe
tgcgcttgatcaactgaaccagtat

SEQ ID NO: 272785 - DNA, 25 bp, probe
tgcagctgtgctacgcgaacgtgaa

SEQ ID NO: 272786 - DNA, 25 bp, probe
tgcagctggattacgcaacagtaaa

SEQ ID NO: 272787 - DNA, 25 bp, probe
tgcagtggtgatgcctaaaggaatg

SEQ ID NO: 272788 - DNA, 25 bp, probe
tgcagtttatgtgtcatcaatgtac

SEQ ID NO: 272789 - DNA, 25 bp, probe
tgcatgtttgttgtatacttcctta

SEQ ID NO: 272790 - DNA, 25 bp, probe
tgcagacctttttatacatggcttt

SEQ ID NO: 272791 - DNA, 25 bp, probe
tgcatgacctttggtacatgcctgt

SEQ ID NO: 272792 - DNA, 25 bp, probe
tgcagccacaggggcaacacctgtt

SEQ ID NO: 272793 - DNA, 25 bp, probe
tgcatcatcaagcacgaccacattg

SEQ ID NO: 272794 - DNA, 25 bp, probe
tgcatcatcaagcacgaccacattg

SEQ ID NO: 272795 - DNA, 25 bp, probe
tgcattaagaacgacgccactgccc

SEQ ID NO: 272796 - DNA, 25 bp, probe
tgcattaagaacgacgccactgccc

SEQ ID NO: 272797 - DNA, 25 bp, probe
tgcagatactgagcccaggcctgca

SEQ ID NO: 272798 - DNA, 25 bp, probe
tgcagtttgagacccaggtgctgtg

SEQ ID NO: 272799 - DNA, 25 bp, probe
tgcagaagggaccctgcgtgcagtg

SEQ ID NO: 272800 - DNA, 25 bp, probe
tgcagaatgacgatgcctgccttgg

SEQ ID NO: 272801 - DNA, 25 bp, probe
tgcagagatcggcatgtcaccttgg

SEQ ID NO: 272802 - DNA, 25 bp, probe
tgcagcgtgaggcttcagcctggag

SEQ ID NO: 272803 - DNA, 25 bp, probe
tgcacctggaggcgcactatgaggc

SEQ ID NO: 272804 - DNA, 25 bp, probe
tgcaccaggaagcccgagcagaagc

SEQ ID NO: 272805 - DNA, 25 bp, probe
tgcaccctgatatacagcacggagc

SEQ ID NO: 272806 - DNA, 25 bp, probe
tgcaccccaagaggcgtgagggcaa

SEQ ID NO: 272807 - DNA, 25 bp, probe
tgcaccctggagagcgtcaggggcc

SEQ ID NO: 272808 - DNA, 25 bp, probe
tgcagtttgtgactgggtccacgcg

SEQ ID NO: 272809 - DNA, 25 bp, probe
tgcatggcctgatcatggtgtgccc

SEQ ID NO: 272810 - DNA, 25 bp, probe
tgcatgacctgggcattgtacaccg

SEQ ID NO: 272811 - DNA, 25 bp, probe
tgcatatgcttgacagctttgaaac

SEQ ID NO: 272812 - DNA, 25 bp, probe
tgcattgtaagagttctgtcatgca

SEQ ID NO: 272813 - DNA, 25 bp, probe
tgcatttgctatgtgccgtcagcac

SEQ ID NO: 272814 - DNA, 25 bp, probe
tgcagtgtgctgttgtgcacgtcag

SEQ ID NO: 272815 - DNA, 25 bp, probe
tgcaggcgctgcggatcatgcgcat

SEQ ID NO: 272816 - DNA, 25 bp, probe
tgcaggtgctgcggaatcagggctc

SEQ ID NO: 272817 - DNA, 25 bp, probe
tgcaggtgggcctgcacgagctgct

SEQ ID NO: 272818 - DNA, 25 bp, probe
tgcagaggaaggtgcacgaggcccg

SEQ ID NO: 272819 - DNA, 25 bp, probe
tgcaggagaaggtgatgatctgggc

SEQ ID NO: 272820 - DNA, 25 bp, probe
tgcacgagcagggggtgctgtgccg

SEQ ID NO: 272821 - DNA, 25 bp, probe
tgcacgagcagggggtgctgtgccg

SEQ ID NO: 272822 - DNA, 25 bp, probe
tgcagcagatcatgcgagggtaccg

SEQ ID NO: 272823 - DNA, 25 bp, probe
tgcagatgtccctaaggtagaggtg

SEQ ID NO: 272824 - DNA, 25 bp, probe
tgcaccccctcaaggtgaagagctg

SEQ ID NO: 272825 - DNA, 25 bp, probe
tgcacccaccatgaggcatggagca

SEQ ID NO: 272826 - DNA, 25 bp, probe
tgcaccccaacctctgtaaatagat

SEQ ID NO: 272827 - DNA, 25 bp, probe
tgcccccaactgttagtcaattgag

SEQ ID NO: 272828 - DNA, 25 bp, probe
tgcccctcgagattttggaattcgt

SEQ ID NO: 272829 - DNA, 25 bp, probe
tgccttctcggctcttgacacttag

SEQ ID NO: 272830 - DNA, 25 bp, probe
tgcttacggtcatctggacgttctg

SEQ ID NO: 272831 - DNA, 25 bp, probe
tgcttatccaactctgaatcttttt

SEQ ID NO: 272832 - DNA, 25 bp, probe
tgcttatccaactctgaatcttttt

SEQ ID NO: 272833 - DNA, 25 bp, probe
tgcttcacaaaatgcacttctattt

SEQ ID NO: 272834 - DNA, 25 bp, probe
tgctcatgccatcaataacttgcga

SEQ ID NO: 272835 - DNA, 25 bp, probe
tgctaccacaactatattatcatgc

SEQ ID NO: 272836 - DNA, 25 bp, probe
tgcttggcaaccttcttatcatggc

SEQ ID NO: 272837 - DNA, 25 bp, probe
tgctatgtgcaaggcctttttaggc

SEQ ID NO: 272838 - DNA, 25 bp, probe
tgcagtggacatggcctttgttcct

SEQ ID NO: 272839 - DNA, 25 bp, probe
tgctggtaactgctttgcttcttga

SEQ ID NO: 272840 - DNA, 25 bp, probe
tgctcaataactctactcatttgta

SEQ ID NO: 272841 - DNA, 25 bp, probe
tgcttattacttaattgttcatgtt

SEQ ID NO: 272842 - DNA, 25 bp, probe
tgcttcctacctcaagatcttggca

SEQ ID NO: 272843 - DNA, 25 bp, probe
tgcttcctacctcaagatcttggca

SEQ ID NO: 272844 - DNA, 25 bp, probe
tgctgtccatcccatggaaacatgg

SEQ ID NO: 272845 - DNA, 25 bp, probe
tgcttacatctcctggataaataat

SEQ ID NO: 272846 - DNA, 25 bp, probe
tgcttcacatcctgcctaagaggca

SEQ ID NO: 272847 - DNA, 25 bp, probe
tgctctctaccaactaccatgaggc

SEQ ID NO: 272848 - DNA, 25 bp, probe
tgcatgttctcctctatcttagagg

SEQ ID NO: 272849 - DNA, 25 bp, probe
tgcatttctgggtttcttgtgtgga

SEQ ID NO: 272850 - DNA, 25 bp, probe
tgcattccggggtgtatgtgtggag

SEQ ID NO: 272851 - DNA, 25 bp, probe
tgcaggaaggccgggttgtgagggg

SEQ ID NO: 272852 - DNA, 25 bp, probe
tgcagaagaggccgcggcttctggg

SEQ ID NO: 272853 - DNA, 25 bp, probe
tgcagaagaggccgcggcttctggg

SEQ ID NO: 272854 - DNA, 25 bp, probe
tgcagccgggcggcagatctagcgg

SEQ ID NO: 272855 - DNA, 25 bp, probe
tgcagctccaggtacatatcacgcg

SEQ ID NO: 272856 - DNA, 25 bp, probe
tgcagctcaggtcaaccagacgtgc

SEQ ID NO: 272857 - DNA, 25 bp, probe
tgctctgcaggaagacactaatcga

SEQ ID NO: 272858 - DNA, 25 bp, probe
tgctttggatagtctcctacgcacc

SEQ ID NO: 272859 - DNA, 25 bp, probe
tgctttggatagtctcctacgcacc

SEQ ID NO: 272860 - DNA, 25 bp, probe
tgcttgatgggcacatgccccacac

SEQ ID NO: 272861 - DNA, 25 bp, probe
tgctacagagccacagtaccagcca

SEQ ID NO: 272862 - DNA, 25 bp, probe
tgctacagagccacagtaccagcca

SEQ ID NO: 272863 - DNA, 25 bp, probe
tgctcaaagcatgtcagtttcctta

SEQ ID NO: 272864 - DNA, 25 bp, probe
tgcttctgatatgcagttttcctta

SEQ ID NO: 272865 - DNA, 25 bp, probe
tgcttggcttctgaggtatccttta

SEQ ID NO: 272866 - DNA, 25 bp, probe
tgctttgccattgaagattactttc

SEQ ID NO: 272867 - DNA, 25 bp, probe
tgctttgccattgaagattactttc

SEQ ID NO: 272868 - DNA, 25 bp, probe
tgctcttaattggaacattgacttt

SEQ ID NO: 272869 - DNA, 25 bp, probe
tgctattaagtcattctgaatcttt

SEQ ID NO: 272870 - DNA, 25 bp, probe
tgctttgtagtttgttgacatctta

SEQ ID NO: 272871 - DNA, 25 bp, probe
tgcttttagctgtcttgtaacccac

SEQ ID NO: 272872 - DNA, 25 bp, probe
tgcagtttgacttctttgagacaga

SEQ ID NO: 272873 - DNA, 25 bp, probe
tgcagttttctctagaaagctctga

SEQ ID NO: 272874 - DNA, 25 bp, probe
tgcaggtcctctcctaaagatctca

SEQ ID NO: 272875 - DNA, 25 bp, probe
tgcaggtcctctcctaaagatctca

SEQ ID NO: 272876 - DNA, 25 bp, probe
tgctgcgtcctatgtaaagtacttg

SEQ ID NO: 272877 - DNA, 25 bp, probe
tgctagcttccatgtgaaactttgt

SEQ ID NO: 272878 - DNA, 25 bp, probe
tgcttctacacatgtggtactctga

SEQ ID NO: 272879 - DNA, 25 bp, probe
tgctcttcacagtcgggttacaggc

SEQ ID NO: 272880 - DNA, 25 bp, probe
tgcatcccactgtgggtggagagga

SEQ ID NO: 272881 - DNA, 25 bp, probe
tgcattgcgttgtggaattgggaag

SEQ ID NO: 272882 - DNA, 25 bp, probe
tgctatcctttaccagagttggaag

SEQ ID NO: 272883 - DNA, 25 bp, probe
tgcattcctgatgaccaatgggatg

SEQ ID NO: 272884 - DNA, 25 bp, probe
tgcagccgtgtggacgaagtttggc

SEQ ID NO: 272885 - DNA, 25 bp, probe
tgcaggcagagggagccacagctgt

SEQ ID NO: 272886 - DNA, 25 bp, probe
tgcatgccaaggggaagagcgacac

SEQ ID NO: 272887 - DNA, 25 bp, probe
tgcagcccaaggcacagggactgcc

SEQ ID NO: 272888 - DNA, 25 bp, probe
tgcgtccacggagatgggcacgcgg

SEQ ID NO: 272889 - DNA, 25 bp, probe
tgctgggaaagaaagggcaccgttt

SEQ ID NO: 272890 - DNA, 25 bp, probe
tgctgggaaagaaagggcaccgttt

SEQ ID NO: 272891 - DNA, 25 bp, probe
tgctgcggaaaaccgcccacagagt

SEQ ID NO: 272892 - DNA, 25 bp, probe
tgcggaaaaccgcccacagagtgga

SEQ ID NO: 272893 - DNA, 25 bp, probe
tgcaggagaaatgcgccctcatgga

SEQ ID NO: 272894 - DNA, 25 bp, probe
tgcagagtgtaatcagcaccccatc

SEQ ID NO: 272895 - DNA, 25 bp, probe
tgcagaatgtgctcaacaaccagca

SEQ ID NO: 272896 - DNA, 25 bp, probe
tgcgaaggacgcgcaaatgcagcaa

SEQ ID NO: 272897 - DNA, 25 bp, probe
tgcagacaggacgctccgagcgaat

SEQ ID NO: 272898 - DNA, 25 bp, probe
tgcagacagaaagcactccatgcga

SEQ ID NO: 272899 - DNA, 25 bp, probe
tgcagacagaaagcactccatgcga

SEQ ID NO: 272900 - DNA, 25 bp, probe
tgcagacaaagatttctgccaagaa

SEQ ID NO: 272901 - DNA, 25 bp, probe
tgcagcagctattgcacttcagcca

SEQ ID NO: 272902 - DNA, 25 bp, probe
tgcagcaagcagaccttcgcatcaa

SEQ ID NO: 272903 - DNA, 25 bp, probe
tgcatccgcagaagctgcctgcatc

SEQ ID NO: 272904 - DNA, 25 bp, probe
tgcagcagcagggcagctcgatgca

SEQ ID NO: 272905 - DNA, 25 bp, probe
tgcagcagagggcctcgtgtggtca

SEQ ID NO: 272906 - DNA, 25 bp, probe
tgcagctggccgccaagatgggcaa

SEQ ID NO: 272907 - DNA, 25 bp, probe
tgcagctggccgccaagatgggcaa

SEQ ID NO: 272908 - DNA, 25 bp, probe
tgcatgtgaccacaaatgcttgctt

SEQ ID NO: 272909 - DNA, 25 bp, probe
tgctggacctaaaatcaatgatcga

SEQ ID NO: 272910 - DNA, 25 bp, probe
tgctggcaccctaaagccgaaatgc

SEQ ID NO: 272911 - DNA, 25 bp, probe
tgcagtgcacccagcagtgcagtga

SEQ ID NO: 272912 - DNA, 25 bp, probe
tgcagtcaacgacgcaggattccac

SEQ ID NO: 272913 - DNA, 25 bp, probe
tgcagaaccagacagagaaccccac

SEQ ID NO: 272914 - DNA, 25 bp, probe
tgcagaaccagacagagaaccccac

SEQ ID NO: 272915 - DNA, 25 bp, probe
tgcagaaccagacagagaaccccac

SEQ ID NO: 272916 - DNA, 25 bp, probe
tgcagaaccagacagagaaccccac

SEQ ID NO: 272917 - DNA, 25 bp, probe
tgcagaaccagacagagaaccccac

SEQ ID NO: 272918 - DNA, 25 bp, probe
tgcagtgatccattgtagcgaaggc

SEQ ID NO: 272919 - DNA, 25 bp, probe
tgcagatatccatcacactggcggc

SEQ ID NO: 272920 - DNA, 25 bp, probe
tgcagagcatccgaaagcggcatcg

SEQ ID NO: 272921 - DNA, 25 bp, probe
tgcagatgctgctcaagggtgtcgc

SEQ ID NO: 272922 - DNA, 25 bp, probe
tgcagcaggggctatggcttctaca

SEQ ID NO: 272923 - DNA, 25 bp, probe
tcgagggccggactggccacaagga

SEQ ID NO: 272924 - DNA, 25 bp, probe
tgcgttggcccacgtagcaaaaaga

SEQ ID NO: 272925 - DNA, 25 bp, probe
tgcttttgcttatgttcaagaaaga

SEQ ID NO: 272926 - DNA, 25 bp, probe
tgctttgctgtttggtgtaggtaaa

SEQ ID NO: 272927 - DNA, 25 bp, probe
tgctttgctgtttggtgtaggtaaa

SEQ ID NO: 272928 - DNA, 25 bp, probe
tgctttgctgaccaaatgcctggta

SEQ ID NO: 272929 - DNA, 25 bp, probe
tgctcttctccacaatcaacagtag

SEQ ID NO: 272930 - DNA, 25 bp, probe
tgctcagtcttctgaactccaggga

SEQ ID NO: 272931 - DNA, 25 bp, probe
tgctcagcccagtgacacttaggcc

SEQ ID NO: 272932 - DNA, 25 bp, probe
tgctctgcgtaggaccctacaacgc

SEQ ID NO: 272933 - DNA, 25 bp, probe
tgctctgcgtaggaccctacaacgc

SEQ ID NO: 272934 - DNA, 25 bp, probe
tgcatctggaaggcgtcgtcacaaa

SEQ ID NO: 272935 - DNA, 25 bp, probe
tgcagtggataggtacgtcaccatc

SEQ ID NO: 272936 - DNA, 25 bp, probe
tgcagtggctgcactactacctgca

SEQ ID NO: 272937 - DNA, 25 bp, probe
tgcagtggctgcactactacctgca

SEQ ID NO: 272938 - DNA, 25 bp, probe
tgcaggatgcctactgcacattccc

SEQ ID NO: 272939 - DNA, 25 bp, probe
tgcaggatgcccacgtcatcctgaa

SEQ ID NO: 272940 - DNA, 25 bp, probe
tgcaggagaggaggcgtccctacat

SEQ ID NO: 272941 - DNA, 25 bp, probe
tgcagtggggggagatgcctacttc

SEQ ID NO: 272942 - DNA, 25 bp, probe
tgcagggggtgacagatggccacaa

SEQ ID NO: 272943 - DNA, 25 bp, probe
tgcagggggtgacagatggccacaa

SEQ ID NO: 272944 - DNA, 25 bp, probe
tgcagtgggggccgagtagggaagg

SEQ ID NO: 272945 - DNA, 25 bp, probe
tgcttggggagctagagtatgacaa

SEQ ID NO: 272946 - DNA, 25 bp, probe
tgcatcatggaggatttagtaccca

SEQ ID NO: 272947 - DNA, 25 bp, probe
tgcagagggaacctggtacatccag

SEQ ID NO: 272948 - DNA, 25 bp, probe
tgcaggctggaccactggtccttac

SEQ ID NO: 272949 - DNA, 25 bp, probe
tgcagagctggccaatgctgggcgg

SEQ ID NO: 272950 - DNA, 25 bp, probe
tgcagagctggccaatgctgggcgg

SEQ ID NO: 272951 - DNA, 25 bp, probe
tgcagagcggcgaggcgctgcagag

SEQ ID NO: 272952 - DNA, 25 bp, probe
tgcaggcagggctgactctaggtgc

SEQ ID NO: 272953 - DNA, 25 bp, probe
tgctgccatttctggcttatggttt

SEQ ID NO: 272954 - DNA, 25 bp, probe
tgcatgcacaatctgggtcctggtg

SEQ ID NO: 272955 - DNA, 25 bp, probe
tgcatgcacaatctgggtcctggtg

SEQ ID NO: 272956 - DNA, 25 bp, probe
tgcatcaagtgttcgagtccctgag

SEQ ID NO: 272957 - DNA, 25 bp, probe
tgcatcaggtctacacagtccttgc

SEQ ID NO: 272958 - DNA, 25 bp, probe
tgcatcagtgtggtagcttgctcaa

SEQ ID NO: 272959 - DNA, 25 bp, probe
tgcatcatcatgggttgcttctgcc

SEQ ID NO: 272960 - DNA, 25 bp, probe
tgcagataatgggctgctgctggct

SEQ ID NO: 272961 - DNA, 25 bp, probe
tgcagtgcatgattggcctatacat

SEQ ID NO: 272962 - DNA, 25 bp, probe
tgcagatatttccctaacatgtcct

SEQ ID NO: 272963 - DNA, 25 bp, probe
tgcagattttggctggtctgtgcac

SEQ ID NO: 272964 - DNA, 25 bp, probe
tgcatggtgttttctggtctgtgcc

SEQ ID NO: 272965 - DNA, 25 bp, probe
tgctagtcatgttcttggttctgtc

SEQ ID NO: 272966 - DNA, 25 bp, probe
tgctagcctgctacttggtgaagga

SEQ ID NO: 272967 - DNA, 25 bp, probe
tgcagagcttgcccttctgcagaag

SEQ ID NO: 272968 - DNA, 25 bp, probe
tgcagagcttgcccttctgcagaag

SEQ ID NO: 272969 - DNA, 25 bp, probe
tgcagtgcgatggtctttctgtaga

SEQ ID NO: 272970 - DNA, 25 bp, probe
tgcagatcgaggactttctggagga

SEQ ID NO: 272971 - DNA, 25 bp, probe
tgcgttggaatcacctggagggctt

SEQ ID NO: 272972 - DNA, 25 bp, probe
tgcagaggacccccactgggggcat

SEQ ID NO: 272973 - DNA, 25 bp, probe
tgcagggagctcaagcccttgggga

SEQ ID NO: 272974 - DNA, 25 bp, probe
tgcagtgtactttgccgaggcggaa

SEQ ID NO: 272975 - DNA, 25 bp, probe
tgcagtgtactttgccgaggcggaa

SEQ ID NO: 272976 - DNA, 25 bp, probe
tgcattgtcatcatcccgaacggaa

SEQ ID NO: 272977 - DNA, 25 bp, probe
tgcatccatgtaacccagtactgga

SEQ ID NO: 272978 - DNA, 25 bp, probe
tgcatccatgtaacccagtactgga

SEQ ID NO: 272979 - DNA, 25 bp, probe
tgcatacattatggaaacatttgga

SEQ ID NO: 272980 - DNA, 25 bp, probe
tgcataatggctgggacgacctgga

SEQ ID NO: 272981 - DNA, 25 bp, probe
tgcagaaagccatctctgtcctgga

SEQ ID NO: 272982 - DNA, 25 bp, probe
tgcgcaaagccagcgtgaccatcga

SEQ ID NO: 272983 - DNA, 25 bp, probe
tgctcaacgacatcgtgattctcca

SEQ ID NO: 272984 - DNA, 25 bp, probe
tgcatcaacttccgcaagttctcca

SEQ ID NO: 272985 - DNA, 25 bp, probe
tgcagacacttcccaagtgtctgct

SEQ ID NO: 272986 - DNA, 25 bp, probe
tgcagaccccagccaagggagatga

SEQ ID NO: 272987 - DNA, 25 bp, probe
tgcagaccgctcgggcatggagaat

SEQ ID NO: 272988 - DNA, 25 bp, probe
tgcagacctcacggctggcaaaatc

SEQ ID NO: 272989 - DNA, 25 bp, probe
tgcgactcacacgcttcaattcaag

SEQ ID NO: 272990 - DNA, 25 bp, probe
tgccctgaccccgatcagttaagga

SEQ ID NO: 272991 - DNA, 25 bp, probe
tgctctcgactcaagaaggttaaca

SEQ ID NO: 272992 - DNA, 25 bp, probe
tgctccgaacaaatagtaaataact

SEQ ID NO: 272993 - DNA, 25 bp, probe
tgcttggcaacacgacttgaaataa

SEQ ID NO: 272994 - DNA, 25 bp, probe
tgcttggcaacacgacttgaaataa

SEQ ID NO: 272995 - DNA, 25 bp, probe
tgcatgtccaaacgaagtaacaaaa

SEQ ID NO: 272996 - DNA, 25 bp, probe
tgcaggccctggcagacgagaagaa

SEQ ID NO: 272997 - DNA, 25 bp, probe
tgcatgatgcactgtcaaacggaca

SEQ ID NO: 272998 - DNA, 25 bp, probe
tgcagtcaccgaaagagagcgccta

SEQ ID NO: 272999 - DNA, 25 bp, probe
tgcagtcatcaacaaaagggagaac

SEQ ID NO: 273000 - DNA, 25 bp, probe
tgcttcccaagaaatagttgatgaa

SEQ ID NO: 273001 - DNA, 25 bp, probe
tgcattctccaacgccagaagtgta

SEQ ID NO: 273002 - DNA, 25 bp, probe
tgcagatctacagcgccagagtgct

SEQ ID NO: 273003 - DNA, 25 bp, probe
tgcagtccatcgagcacaagctgga

SEQ ID NO: 273004 - DNA, 25 bp, probe
tgcagtcccactaagcatcatcgtg

SEQ ID NO: 273005 - DNA, 25 bp, probe
tgcaggcctcagtaacatcatcggt

SEQ ID NO: 273006 - DNA, 25 bp, probe
tgcagtcacatttaatcacatcccc

SEQ ID NO: 273007 - DNA, 25 bp, probe
tgcagtggcacaaacacagctcacc

SEQ ID NO: 273008 - DNA, 25 bp, probe
tgcttcagacatgacatcaagacac

SEQ ID NO: 273009 - DNA, 25 bp, probe
tgctaaccatgctagccatgaacca

SEQ ID NO: 273010 - DNA, 25 bp, probe
tgcattaccggtcgatgcaacgagt

SEQ ID NO: 273011 - DNA, 25 bp, probe
tgcagtcacgggagctcagctcagg

SEQ ID NO: 273012 - DNA, 25 bp, probe
tgcagtgagctgtgactgcgccact

SEQ ID NO: 273013 - DNA, 25 bp, probe
tgcatgtggctgcagctatgggccg

SEQ ID NO: 273014 - DNA, 25 bp, probe
tgcatgtgggtgccagaggccagct

SEQ ID NO: 273015 - DNA, 25 bp, probe
tgcaggagaagtcgcagtgcgcact

SEQ ID NO: 273016 - DNA, 25 bp, probe
tgcaggggcagatgttggcagctct

SEQ ID NO: 273017 - DNA, 25 bp, probe
tgcagtctgagatatgggagagctt

SEQ ID NO: 273018 - DNA, 25 bp, probe
tgcagagagagatcatgtggccatg

SEQ ID NO: 273019 - DNA, 25 bp, probe
tgcatggcaaattctgtggcgctga

SEQ ID NO: 273020 - DNA, 25 bp, probe
tgcatggcaagttctgtggttctga

SEQ ID NO: 273021 - DNA, 25 bp, probe
tgcaggcaagagatggaggtccaat

SEQ ID NO: 273022 - DNA, 25 bp, probe
tgcagtgccaagttgggttccttca

SEQ ID NO: 273023 - DNA, 25 bp, probe
tgcagtgccaagttgggttccttca

SEQ ID NO: 273024 - DNA, 25 bp, probe
tgcaggccaggatgttgttcagcgt

SEQ ID NO: 273025 - DNA, 25 bp, probe
tgcaggccaggatgttgttcagcgt

SEQ ID NO: 273026 - DNA, 25 bp, probe
tgcagaggcctatgttttcactcct

SEQ ID NO: 273027 - DNA, 25 bp, probe
tgcagggggtgagtttctgccactc

SEQ ID NO: 273028 - DNA, 25 bp, probe
tgcaggtggagttcatcaaccccat

SEQ ID NO: 273029 - DNA, 25 bp, probe
tgcaggctgaaaaccatgacacctt

SEQ ID NO: 273030 - DNA, 25 bp, probe
tgcagtctgaaacccaagcagccag

SEQ ID NO: 273031 - DNA, 25 bp, probe
tgcttctgcatatactcggacgaca

SEQ ID NO: 273032 - DNA, 25 bp, probe
tgcatcccaactacctggacaagca

SEQ ID NO: 273033 - DNA, 25 bp, probe
tgcctcctaatgacgcggctcaaaa

SEQ ID NO: 273034 - DNA, 25 bp, probe
tgctccacctagacatcaagccaga

SEQ ID NO: 273035 - DNA, 25 bp, probe
tgctctacatctccagcatcaacga

SEQ ID NO: 273036 - DNA, 25 bp, probe
tgcttcactccctatcatattaact

SEQ ID NO: 273037 - DNA, 25 bp, probe
tgcagtcttccttgactcttaacat

SEQ ID NO: 273038 - DNA, 25 bp, probe
tgccatctaccttgggatcaaacgg

SEQ ID NO: 273039 - DNA, 25 bp, probe
tgccattaactacaatgaaaagatc

SEQ ID NO: 273040 - DNA, 25 bp, probe
tgccattagatctagacaagaacat

SEQ ID NO: 273041 - DNA, 25 bp, probe
tgcttttgatcattcaccgaacaaa

SEQ ID NO: 273042 - DNA, 25 bp, probe
tgcttgtttgcatcatcggaaccct

SEQ ID NO: 273043 - DNA, 25 bp, probe
tgcttgtttgcatcatcggaaccct

SEQ ID NO: 273044 - DNA, 25 bp, probe
tgcttttggcattgtcgtgggcacc

SEQ ID NO: 273045 - DNA, 25 bp, probe
tgcttttggcattgtcgtgggcacc

SEQ ID NO: 273046 - DNA, 25 bp, probe
tgctctttgaccctgaatttgacct

SEQ ID NO: 273047 - DNA, 25 bp, probe
tgctctttgaccctgaatttgacct

SEQ ID NO: 273048 - DNA, 25 bp, probe
tgctcttggagctgtgaactggact

SEQ ID NO: 273049 - DNA, 25 bp, probe
tgctcttggagctgtgaactggact

SEQ ID NO: 273050 - DNA, 25 bp, probe
tgcttctggccagggatcctgggtc

SEQ ID NO: 273051 - DNA, 25 bp, probe
tgcttttgctcaggtgacctgttcc

SEQ ID NO: 273052 - DNA, 25 bp, probe
tgcttcagtcatcctgaacctgagt

SEQ ID NO: 273053 - DNA, 25 bp, probe
tgccatcctgcgtctggacctggct

SEQ ID NO: 273054 - DNA, 25 bp, probe
tgccatcctgcgtctggacctggct

SEQ ID NO: 273055 - DNA, 25 bp, probe
tgccattgatggtctggattccacc

SEQ ID NO: 273056 - DNA, 25 bp, probe
tgctcagattggtttgagtgccctt

SEQ ID NO: 273057 - DNA, 25 bp, probe
tgctcaattccagtatgtaccctct

SEQ ID NO: 273058 - DNA, 25 bp, probe
tgcttgtctccagtggaactcacac

SEQ ID NO: 273059 - DNA, 25 bp, probe
tgcagggcttcctgaactcacatca

SEQ ID NO: 273060 - DNA, 25 bp, probe
tgcatggtattggaataactcacag

SEQ ID NO: 273061 - DNA, 25 bp, probe
tgcaggccattggcaacaccatcac

SEQ ID NO: 273062 - DNA, 25 bp, probe
tgcatgcccacagcaaagacaccat

SEQ ID NO: 273063 - DNA, 25 bp, probe
tgcatctaataaaaaacaccttcta

SEQ ID NO: 273064 - DNA, 25 bp, probe
tgctccaacaggaaagagcccctcc

SEQ ID NO: 273065 - DNA, 25 bp, probe
tgcttcccaggttcaagcgattctc

SEQ ID NO: 273066 - DNA, 25 bp, probe
tgcagtcctgcaacttctcagcaga

SEQ ID NO: 273067 - DNA, 25 bp, probe
tgcagtgcgccaagttgctgctgga

SEQ ID NO: 273068 - DNA, 25 bp, probe
tgcagtgcgccaagttgctgctgga

SEQ ID NO: 273069 - DNA, 25 bp, probe
tgcaggtcagcacgttgctgtcgat

SEQ ID NO: 273070 - DNA, 25 bp, probe
tgcagtgcattgcgttgtggaattg

SEQ ID NO: 273071 - DNA, 25 bp, probe
tgcatgtagctgctgatcgtggaaa

SEQ ID NO: 273072 - DNA, 25 bp, probe
tgcatgtagctgctgatcgtggaaa

SEQ ID NO: 273073 - DNA, 25 bp, probe
tgcatgcaagaggtggcaggggaca

SEQ ID NO: 273074 - DNA, 25 bp, probe
tgctcaatatgccccaggctatgac

SEQ ID NO: 273075 - DNA, 25 bp, probe
tgctcagattcaaccgacagaaaga

SEQ ID NO: 273076 - DNA, 25 bp, probe
tgctgaaccgcattgtggagaaaga

SEQ ID NO: 273077 - DNA, 25 bp, probe
tgctacaaccatggtgtctaaagat

SEQ ID NO: 273078 - DNA, 25 bp, probe
tgcattccagcctgggtcacagagt

SEQ ID NO: 273079 - DNA, 25 bp, probe
tgcattccagccttggcgacagagc

SEQ ID NO: 273080 - DNA, 25 bp, probe
tgcttagctgccttgagctaacccc

SEQ ID NO: 273081 - DNA, 25 bp, probe
tgctaagtgctttacgaacattcgt

SEQ ID NO: 273082 - DNA, 25 bp, probe
tgcattattctgaaactcaaatctc

SEQ ID NO: 273083 - DNA, 25 bp, probe
tgcattatctatgatatgctaatat

SEQ ID NO: 273084 - DNA, 25 bp, probe
tgctctgatcattgctgattccttt

SEQ ID NO: 273085 - DNA, 25 bp, probe
tgcatccatttgcagcctgctttca

SEQ ID NO: 273086 - DNA, 25 bp, probe
tgcatccaattgtgcctgaactttt

SEQ ID NO: 273087 - DNA, 25 bp, probe
tgcatccaattgttgctttgaccct

SEQ ID NO: 273088 - DNA, 25 bp, probe
tgcatccacatttgtctcaagaccc

SEQ ID NO: 273089 - DNA, 25 bp, probe
tgcatccacatttgtctcaagaccc

SEQ ID NO: 273090 - DNA, 25 bp, probe
tgcatccattgttgtgtctgtgccc

SEQ ID NO: 273091 - DNA, 25 bp, probe
tgcatcgccagcatttcgatcctcg

SEQ ID NO: 273092 - DNA, 25 bp, probe
tgctcaccagccatgtatgcatctc

SEQ ID NO: 273093 - DNA, 25 bp, probe
tgctatccaggctgtgctatccctg

SEQ ID NO: 273094 - DNA, 25 bp, probe
tgctatcgacaatgccaaccgcatc

SEQ ID NO: 273095 - DNA, 25 bp, probe
tgctatgggagatcttcaccctcgg

SEQ ID NO: 273096 - DNA, 25 bp, probe
tgctatgggagatcttcaccctcgg

SEQ ID NO: 273097 - DNA, 25 bp, probe
tgctttggggacctagacctcaggt

SEQ ID NO: 273098 - DNA, 25 bp, probe
tgctttggggacctagacctcaggt

SEQ ID NO: 273099 - DNA, 25 bp, probe
tgctttggggaccggtattatcggg

SEQ ID NO: 273100 - DNA, 25 bp, probe
tgctggggagagtccggtttactga

SEQ ID NO: 273101 - DNA, 25 bp, probe
tctgggggacaatattgttcactac

SEQ ID NO: 273102 - DNA, 25 bp, probe
tctgggggacaatattgttcactac

SEQ ID NO: 273103 - DNA, 25 bp, probe
tctggtgggacaaaatactgactca

SEQ ID NO: 273104 - DNA, 25 bp, probe
tgcgactgggaagaacactgccccc

SEQ ID NO: 273105 - DNA, 25 bp, probe
tgctgatcggcgccgaatacggccc

SEQ ID NO: 273106 - DNA, 25 bp, probe
tgcattagagcacggagtccgtcca

SEQ ID NO: 273107 - DNA, 25 bp, probe
tgcttgagccacacgtgcaagcgcc

SEQ ID NO: 273108 - DNA, 25 bp, probe
tgcattatcaacatcatattcagcc

SEQ ID NO: 273109 - DNA, 25 bp, probe
tgctatatgaacacatcgggactgt

SEQ ID NO: 273110 - DNA, 25 bp, probe
tgctttgaatatggcaagagggtta

SEQ ID NO: 273111 - DNA, 25 bp, probe
tgcttttagagccagagggaattat

SEQ ID NO: 273112 - DNA, 25 bp, probe
tgctgtcggcagtttggggaagtct

SEQ ID NO: 273113 - DNA, 25 bp, probe
tgctgcggtggttgtgtgggaaact

SEQ ID NO: 273114 - DNA, 25 bp, probe
tgcatgcgagtgctcatttcaggat

SEQ ID NO: 273115 - DNA, 25 bp, probe
tgcatggcatggtccttgtgatggt

SEQ ID NO: 273116 - DNA, 25 bp, probe
tgctatgggactattgctgtgatcg

SEQ ID NO: 273117 - DNA, 25 bp, probe
tgctgaaggacccttttgtgcgctc

SEQ ID NO: 273118 - DNA, 25 bp, probe
tgctgaaggacccttttgtgcgctc

SEQ ID NO: 273119 - DNA, 25 bp, probe
tgctaaggagggacccgtgttgccc

SEQ ID NO: 273120 - DNA, 25 bp, probe
tgctaagtcaggaaatggggtatgc

SEQ ID NO: 273121 - DNA, 25 bp, probe
tgctccgccaggaaagtgagcgtgt

SEQ ID NO: 273122 - DNA, 25 bp, probe
tgctcaggagggtaaggccagggtg

SEQ ID NO: 273123 - DNA, 25 bp, probe
tgctagaagtgggggactcggcggg

SEQ ID NO: 273124 - DNA, 25 bp, probe
tgctagaagtgggggactcggcggg

SEQ ID NO: 273125 - DNA, 25 bp, probe
tgcttcaggagggaggcttcgggca

SEQ ID NO: 273126 - DNA, 25 bp, probe
tgcgtcagtgagaccaccttcgacg

SEQ ID NO: 273127 - DNA, 25 bp, probe
tgctgtcaatatataacccgcctgc

SEQ ID NO: 273128 - DNA, 25 bp, probe
tgctgtcaatatataacccgcctgc

SEQ ID NO: 273129 - DNA, 25 bp, probe
tgctggcaagttcaacatcatcccc

SEQ ID NO: 273130 - DNA, 25 bp, probe
tgcatggaaattcccttcatctgga

SEQ ID NO: 273131 - DNA, 25 bp, probe
tgcaggactttgacctaatcagagt

SEQ ID NO: 273132 - DNA, 25 bp, probe
tcgtacatttgtttgagtcgtttat

SEQ ID NO: 273133 - DNA, 25 bp, probe
tctgaacctcttatgacggttttgt

SEQ ID NO: 273134 - DNA, 25 bp, probe
tgctgaaccttgtttgtcagtgatt

SEQ ID NO: 273135 - DNA, 25 bp, probe
tgcttcaatttgtccttcagtagtt

SEQ ID NO: 273136 - DNA, 25 bp, probe
tgcttacattagtttctcactaggc

SEQ ID NO: 273137 - DNA, 25 bp, probe
tgcttaatccgctggtgaccggtta

SEQ ID NO: 273138 - DNA, 25 bp, probe
tgcttaatccgctggtgaccggtta

SEQ ID NO: 273139 - DNA, 25 bp, probe
tgcttgatatcccaagttggaaggg

SEQ ID NO: 273140 - DNA, 25 bp, probe
tgctatgctccagaacttcaaaggg

SEQ ID NO: 273141 - DNA, 25 bp, probe
tgcatacattcagagggccacactg

SEQ ID NO: 273142 - DNA, 25 bp, probe
tgcatggacaatgagaggcggccgc

SEQ ID NO: 273143 - DNA, 25 bp, probe
tgcaggaacatcgcaaggtgccctt

SEQ ID NO: 273144 - DNA, 25 bp, probe
tgctgaacgccaggaagtgtccttc

SEQ ID NO: 273145 - DNA, 25 bp, probe
tgctaaagccaggattgtgttgggt

SEQ ID NO: 273146 - DNA, 25 bp, probe
tgcatctcacacgactttagtttgg

SEQ ID NO: 273147 - DNA, 25 bp, probe
tgctgtcaccgatattccagtctgg

SEQ ID NO: 273148 - DNA, 25 bp, probe
tgcttcccatgggcattgcaagtgc

SEQ ID NO: 273149 - DNA, 25 bp, probe
tgcttatgttggctgtgctcatggc

SEQ ID NO: 273150 - DNA, 25 bp, probe
tgcattcaaacgcactgctctgaga

SEQ ID NO: 273151 - DNA, 25 bp, probe
tgcattacacaccttagctataaga

SEQ ID NO: 273152 - DNA, 25 bp, probe
tgctatacctccttagcactgagaa

SEQ ID NO: 273153 - DNA, 25 bp, probe
tgcttgacagctttgaaactgataa

SEQ ID NO: 273154 - DNA, 25 bp, probe
tgctggaggttttaacctagacaag

SEQ ID NO: 273155 - DNA, 25 bp, probe
tgctagagtttgcttgcacccacaa

SEQ ID NO: 273156 - DNA, 25 bp, probe
tgctgaactgttcttcaggcccatc

SEQ ID NO: 273157 - DNA, 25 bp, probe
tgcttacatgttcatctcttgccaa

SEQ ID NO: 273158 - DNA, 25 bp, probe
tgctatgtcatttccatcttctgga

SEQ ID NO: 273159 - DNA, 25 bp, probe
tgctatgttatgacactttctcaga

SEQ ID NO: 273160 - DNA, 25 bp, probe
tgcatgatgggaaaggtattagatt

SEQ ID NO: 273161 - DNA, 25 bp, probe
tgctatctggcattatggtaatata

SEQ ID NO: 273162 - DNA, 25 bp, probe
tgctcatctgagtgacggatatgtg

SEQ ID NO: 273163 - DNA, 25 bp, probe
tgcatcacgcagggacgtgagttgg

SEQ ID NO: 273164 - DNA, 25 bp, probe
tgcatcatggaggtacgcggagggc

SEQ ID NO: 273165 - DNA, 25 bp, probe
tgcataggggtaggcctgcagctga

SEQ ID NO: 273166 - DNA, 25 bp, probe
tgcataggggtaggcctgcagctga

SEQ ID NO: 273167 - DNA, 25 bp, probe
tgcatagggaggtcctatggcagcg

SEQ ID NO: 273168 - DNA, 25 bp, probe
tgccagggctttgcttggaggctac

SEQ ID NO: 273169 - DNA, 25 bp, probe
tgccagggctttgcttggaggctac

SEQ ID NO: 273170 - DNA, 25 bp, probe
tgccagggctttgcttggaggctac

SEQ ID NO: 273171 - DNA, 25 bp, probe
tgcgaggtttgtgctcagagccgct

SEQ ID NO: 273172 - DNA, 25 bp, probe
tgctggcggctggtttacgccgctt

SEQ ID NO: 273173 - DNA, 25 bp, probe
tgcatggtggggatctatggcctct

SEQ ID NO: 273174 - DNA, 25 bp, probe
tgcatggtctagggacgttctctct

SEQ ID NO: 273175 - DNA, 25 bp, probe
tgcaggctctgggtcaggttctgct

SEQ ID NO: 273176 - DNA, 25 bp, probe
tgcaggctctgggtcaggttctgct

SEQ ID NO: 273177 - DNA, 25 bp, probe
tgcatcctcttggatctggactcag

SEQ ID NO: 273178 - DNA, 25 bp, probe
tgcatcctcttggatctggactcag

SEQ ID NO: 273179 - DNA, 25 bp, probe
tgcttcttgctgggggaccagggct

SEQ ID NO: 273180 - DNA, 25 bp, probe
tgcttcttgggaggagtggtgggtg

SEQ ID NO: 273181 - DNA, 25 bp, probe
tgcttctttggccaagtagtggcag

SEQ ID NO: 273182 - DNA, 25 bp, probe
tgcttctgggcataagtcctgcaag

SEQ ID NO: 273183 - DNA, 25 bp, probe
tgctttggaactgaggccagcagag

SEQ ID NO: 273184 - DNA, 25 bp, probe
tgcttatgaaggaaaagccatagca

SEQ ID NO: 273185 - DNA, 25 bp, probe
tgcttccaacagaaaatgcacagga

SEQ ID NO: 273186 - DNA, 25 bp, probe
tgcttctccacatgcaagagctctg

SEQ ID NO: 273187 - DNA, 25 bp, probe
tgcttcctcagcaacaggagccgga

SEQ ID NO: 273188 - DNA, 25 bp, probe
tgcttcctcagcaacaggagccgga

SEQ ID NO: 273189 - DNA, 25 bp, probe
tgcttcctcctgacagcgacagaaa

SEQ ID NO: 273190 - DNA, 25 bp, probe
tgcttcctcttgacagctgaatatt

SEQ ID NO: 273191 - DNA, 25 bp, probe
tgctgccatcctcacagctgaaatc

SEQ ID NO: 273192 - DNA, 25 bp, probe
tgcatgcccacctggctggaaatac

SEQ ID NO: 273193 - DNA, 25 bp, probe
tgctccgctgagtgtctgtgaaata

SEQ ID NO: 273194 - DNA, 25 bp, probe
tgctgagcggcttatgttctgaatt

SEQ ID NO: 273195 - DNA, 25 bp, probe
tgctgaccagctaaacaccaatttc

SEQ ID NO: 273196 - DNA, 25 bp, probe
tgctgaatccttgaatactcaattc

SEQ ID NO: 273197 - DNA, 25 bp, probe
tgctcaacaatttatccattcaatc

SEQ ID NO: 273198 - DNA, 25 bp, probe
tgctcaacaatttatccattcaatc

SEQ ID NO: 273199 - DNA, 25 bp, probe
tgctgaacaggttgactatgtcatt

SEQ ID NO: 273200 - DNA, 25 bp, probe
tgctgaacaggttgactatgtcatt

SEQ ID NO: 273201 - DNA, 25 bp, probe
tgctgatatcaggacaagacatttc

SEQ ID NO: 273202 - DNA, 25 bp, probe
tgctaacatagaccagtctgatttt

SEQ ID NO: 273203 - DNA, 25 bp, probe
tgctaaaaggcctcggattctgtca

SEQ ID NO: 273204 - DNA, 25 bp, probe
tgctccgaaggttccgaagccgata

SEQ ID NO: 273205 - DNA, 25 bp, probe
tgcatcccaaggagctcagggccat

SEQ ID NO: 273206 - DNA, 25 bp, probe
tgcatcccagatcgaggccgaaaag

SEQ ID NO: 273207 - DNA, 25 bp, probe
tgcatcctatatccagtaagtagaa

SEQ ID NO: 273208 - DNA, 25 bp, probe
tgcttctattccttccaatgagaga

SEQ ID NO: 273209 - DNA, 25 bp, probe
tgccttaatccattccttgaggaca

SEQ ID NO: 273210 - DNA, 25 bp, probe
tgcttataataatccaggagttgca

SEQ ID NO: 273211 - DNA, 25 bp, probe
tgctgtgtagataagtaagaagtag

SEQ ID NO: 273212 - DNA, 25 bp, probe
tgccgtcagatccttaaaggtcttc

SEQ ID NO: 273213 - DNA, 25 bp, probe
tccttcctcgggagatggacatcct

SEQ ID NO: 273214 - DNA, 25 bp, probe
tcacgtcccgagctggggtaatcaa

SEQ ID NO: 273215 - DNA, 25 bp, probe
tccccccaacctgggatgaaatctc

SEQ ID NO: 273216 - DNA, 25 bp, probe
tgcttccgataccctcaggaaaatc

SEQ ID NO: 273217 - DNA, 25 bp, probe
tgcttccgataccctcaggaaaatc

SEQ ID NO: 273218 - DNA, 25 bp, probe
tgcgcatccaggtggtcaagaaaac

SEQ ID NO: 273219 - DNA, 25 bp, probe
tgctcccggggactcaagaggaatc

SEQ ID NO: 273220 - DNA, 25 bp, probe
tgctacacggataccccaaggacat

SEQ ID NO: 273221 - DNA, 25 bp, probe
tgctgaagggacagccctgggtcta

SEQ ID NO: 273222 - DNA, 25 bp, probe
tgctcgaaagcctccattgggttat

SEQ ID NO: 273223 - DNA, 25 bp, probe
tgctgggcgtccacgaagtggtctt

SEQ ID NO: 273224 - DNA, 25 bp, probe
tgctggggctgctggcagaaggggc

SEQ ID NO: 273225 - DNA, 25 bp, probe
tgctttctgcagtgaaatcagtggt

SEQ ID NO: 273226 - DNA, 25 bp, probe
tgcattttgcatgggatgaacagtg

SEQ ID NO: 273227 - DNA, 25 bp, probe
tgcatctttgcagagctggccaatg

SEQ ID NO: 273228 - DNA, 25 bp, probe
tgcatctttgcagagctggccaatg

SEQ ID NO: 273229 - DNA, 25 bp, probe
tgcatcttctatgagatggccacag

SEQ ID NO: 273230 - DNA, 25 bp, probe
tgctcatgtttgaagatgatggcag

SEQ ID NO: 273231 - DNA, 25 bp, probe
tgcatgtttctgagtgcatgaagtt

SEQ ID NO: 273232 - DNA, 25 bp, probe
tgcttgattctttctcagaggtttg

SEQ ID NO: 273233 - DNA, 25 bp, probe
tgcttttcatttccagagagcttca

SEQ ID NO: 273234 - DNA, 25 bp, probe
tgctttgttttgtaggacttgttct

SEQ ID NO: 273235 - DNA, 25 bp, probe
tgctttgtttctttgcaatgcattg

SEQ ID NO: 273236 - DNA, 25 bp, probe
tgctggtgtttgcgggatgttggct

SEQ ID NO: 273237 - DNA, 25 bp, probe
tgctgtggttggcttggggtggcca

SEQ ID NO: 273238 - DNA, 25 bp, probe
tgcatgggttggctgtggggacccc

SEQ ID NO: 273239 - DNA, 25 bp, probe
tgcatgggttggctgtggggacccc

SEQ ID NO: 273240 - DNA, 25 bp, probe
tgcgcagggaggggtacgtggcacc

SEQ ID NO: 273241 - DNA, 25 bp, probe
tgccatccgtgtgttccgggcctgc

SEQ ID NO: 273242 - DNA, 25 bp, probe
tgctctccggttctctggaggtcat

SEQ ID NO: 273243 - DNA, 25 bp, probe
tgctctccggttctctggaggtcat

SEQ ID NO: 273244 - DNA, 25 bp, probe
tgctctaccagtccttcgtgaagga

SEQ ID NO: 273245 - DNA, 25 bp, probe
tgctctaccagtccttcgtgaagga

SEQ ID NO: 273246 - DNA, 25 bp, probe
tgctccagcaagtctgagtctgata

SEQ ID NO: 273247 - DNA, 25 bp, probe
tgctagcatcaatcgcatttatgga

SEQ ID NO: 273248 - DNA, 25 bp, probe
tgctagcatcaatcgcatttatgga

SEQ ID NO: 273249 - DNA, 25 bp, probe
tgctagctctgagccagttcagtac

SEQ ID NO: 273250 - DNA, 25 bp, probe
tgcttcactggccagagcttagtca

SEQ ID NO: 273251 - DNA, 25 bp, probe
tgcttactgcgctagacgcttcatc

SEQ ID NO: 273252 - DNA, 25 bp, probe
tgcttatctgtctaacttggctggt

SEQ ID NO: 273253 - DNA, 25 bp, probe
tgctttgtatgcaaccttagctgat

SEQ ID NO: 273254 - DNA, 25 bp, probe
tgcttggttccacaatcatctattg

SEQ ID NO: 273255 - DNA, 25 bp, probe
tgcttgtgatatctggagtttagga

SEQ ID NO: 273256 - DNA, 25 bp, probe
tgcttgtgtctcttgcatgattctt

SEQ ID NO: 273257 - DNA, 25 bp, probe
tgctgtcgtgcttataatattatca

SEQ ID NO: 273258 - DNA, 25 bp, probe
tgctgtcgtgcttataatattatca

SEQ ID NO: 273259 - DNA, 25 bp, probe
tgctgatcgtgctaaattttcagta

SEQ ID NO: 273260 - DNA, 25 bp, probe
tgcatacattgcgaagattcttaat

SEQ ID NO: 273261 - DNA, 25 bp, probe
tgcatacattgcgaagattcttaat

SEQ ID NO: 273262 - DNA, 25 bp, probe
tgcatgaaccccattctgtatgttt

SEQ ID NO: 273263 - DNA, 25 bp, probe
tgctccagcctcgatttggttttat

SEQ ID NO: 273264 - DNA, 25 bp, probe
tgcatcaagtcttctgatctcagat

SEQ ID NO: 273265 - DNA, 25 bp, probe
tgctcacttacattatgctcagtgg

SEQ ID NO: 273266 - DNA, 25 bp, probe
tgctatctctacattccattgaatt

SEQ ID NO: 273267 - DNA, 25 bp, probe
tgctgatcttgtgttcctatactcg

SEQ ID NO: 273268 - DNA, 25 bp, probe
tgctgatcttgtgttcctatactcg

SEQ ID NO: 273269 - DNA, 25 bp, probe
tgcgtttcttttgcatgactgtggc

SEQ ID NO: 273270 - DNA, 25 bp, probe
tgcttaccttcattcgtgacagtgg

SEQ ID NO: 273271 - DNA, 25 bp, probe
tgcttctccttgcatgagctggagg

SEQ ID NO: 273272 - DNA, 25 bp, probe
tgcatgcctccagcgatggggagct

SEQ ID NO: 273273 - DNA, 25 bp, probe
tgctccatcggggcagggggtatgc

SEQ ID NO: 273274 - DNA, 25 bp, probe
tgctttctgcgtggggagtgcgatg

SEQ ID NO: 273275 - DNA, 25 bp, probe
tgcatttctagcgagctggcgtggg

SEQ ID NO: 273276 - DNA, 25 bp, probe
tgcttcatgctacgtgtgggtgacc

SEQ ID NO: 273277 - DNA, 25 bp, probe
tgcttcatgctacgtgtgggtgacc

SEQ ID NO: 273278 - DNA, 25 bp, probe
tgctatgtgcttcgcatcttgggca

SEQ ID NO: 273279 - DNA, 25 bp, probe
tgctatgtgcttcgcatcttgggca

SEQ ID NO: 273280 - DNA, 25 bp, probe
tgctatgtgcttcgcatcttgggca

SEQ ID NO: 273281 - DNA, 25 bp, probe
tgctatgtgacttgcatcgtggaga

SEQ ID NO: 273282 - DNA, 25 bp, probe
tgctctgatgtttgctcagtgcaag

SEQ ID NO: 273283 - DNA, 25 bp, probe
tgctcatggtcttcgagtatatgcg

SEQ ID NO: 273284 - DNA, 25 bp, probe
tgctctgtgtctctgagaaggctgc

SEQ ID NO: 273285 - DNA, 25 bp, probe
tgctgctgcagtgggtcaagacgga

SEQ ID NO: 273286 - DNA, 25 bp, probe
tgcccacttgggagacgggtcttct

SEQ ID NO: 273287 - DNA, 25 bp, probe
tgcccacttgggagacgggtcttct

SEQ ID NO: 273288 - DNA, 25 bp, probe
tgcgctactttgagggcgagttcac

SEQ ID NO: 273289 - DNA, 25 bp, probe
tgcgctactttgagggcgagttcac

SEQ ID NO: 273290 - DNA, 25 bp, probe
tgcgctactttgagggcgagttcac

SEQ ID NO: 273291 - DNA, 25 bp, probe
tgcgctacaagtcagcctgggtttc

SEQ ID NO: 273292 - DNA, 25 bp, probe
tccattaacaaagcgggctttgccg

SEQ ID NO: 273293 - DNA, 25 bp, probe
tcctaaaagaggaggccatcttctc

SEQ ID NO: 273294 - DNA, 25 bp, probe
tgcctggaaagatgggtccactgcc

SEQ ID NO: 273295 - DNA, 25 bp, probe
tgcctggttcacgagaagttcagtt

SEQ ID NO: 273296 - DNA, 25 bp, probe
tgctccgtttcttgaagtttgctga

SEQ ID NO: 273297 - DNA, 25 bp, probe
tgctcatcagctcttcaaaggattc

SEQ ID NO: 273298 - DNA, 25 bp, probe
tgctcatcgccctcatgagcgagac

SEQ ID NO: 273299 - DNA, 25 bp, probe
tgctcagtgccatgaagatggagac

SEQ ID NO: 273300 - DNA, 25 bp, probe
tgctgacatgtctgaaatagaagct

SEQ ID NO: 273301 - DNA, 25 bp, probe
tgctccactgcccaacaagaagtaa

SEQ ID NO: 273302 - DNA, 25 bp, probe
tgctccaccactagaacgacgtagt

SEQ ID NO: 273303 - DNA, 25 bp, probe
tcgtcgcttcttgaagacctatgta

SEQ ID NO: 273304 - DNA, 25 bp, probe
tgcttctcctttaaaactcaagtac

SEQ ID NO: 273305 - DNA, 25 bp, probe
tgctttctctttcagtattaaactc

SEQ ID NO: 273306 - DNA, 25 bp, probe
tgctttcgtgtaaattatgtaatgc

SEQ ID NO: 273307 - DNA, 25 bp, probe
tgctttagctggggttctgtcacag

SEQ ID NO: 273308 - DNA, 25 bp, probe
tgctttagctggggttctgtcacag

SEQ ID NO: 273309 - DNA, 25 bp, probe
tgcttttctgcggctgtgtagtaaa

SEQ ID NO: 273310 - DNA, 25 bp, probe
tgctttcgcccagtttcatggctaa

SEQ ID NO: 273311 - DNA, 25 bp, probe
tgctttcgcccagtttcatggctaa

SEQ ID NO: 273312 - DNA, 25 bp, probe
tgctttggttactttgctgttcact

SEQ ID NO: 273313 - DNA, 25 bp, probe
tgctttggttactttgctgttcact

SEQ ID NO: 273314 - DNA, 25 bp, probe
tgctcttgggaggtttccatatcct

SEQ ID NO: 273315 - DNA, 25 bp, probe
tgctcttgacatcttttccatgatc

SEQ ID NO: 273316 - DNA, 25 bp, probe
tgctcttgacatcttttccatgatc

SEQ ID NO: 273317 - DNA, 25 bp, probe
tgctgtgtactcattgtcttctatc

SEQ ID NO: 273318 - DNA, 25 bp, probe
tgctgtgtacacatctgctttgttc

SEQ ID NO: 273319 - DNA, 25 bp, probe
tgcttctacacatttcatctaattt

SEQ ID NO: 273320 - DNA, 25 bp, probe
tgctctcctgaatttatgaggttta

SEQ ID NO: 273321 - DNA, 25 bp, probe
tgcccagagatcttacgaggcttgc

SEQ ID NO: 273322 - DNA, 25 bp, probe
tgccaactgaagtgccgactggacc

SEQ ID NO: 273323 - DNA, 25 bp, probe
tgcccaccatagtgcggaaaggcgg

SEQ ID NO: 273324 - DNA, 25 bp, probe
tgctctcagaaccttggggaaggtg

SEQ ID NO: 273325 - DNA, 25 bp, probe
tgctacaggacgcgctggcgagatg

SEQ ID NO: 273326 - DNA, 25 bp, probe
tctgaaaagctgctcggggtttttt

SEQ ID NO: 273327 - DNA, 25 bp, probe
tgctaacaatgctctggggtctttt

SEQ ID NO: 273328 - DNA, 25 bp, probe
tgctcaaccactgtggcgttctgct

SEQ ID NO: 273329 - DNA, 25 bp, probe
tgctccccagctggggaacctcaac

SEQ ID NO: 273330 - DNA, 25 bp, probe
tgctgctcacactgtatggaaccca

SEQ ID NO: 273331 - DNA, 25 bp, probe
tgctgctcacactgtatggaaccca

SEQ ID NO: 273332 - DNA, 25 bp, probe
tgctctgtgctgggatcatggaact

SEQ ID NO: 273333 - DNA, 25 bp, probe
tgctcattgcctgtgtggcacaatg

SEQ ID NO: 273334 - DNA, 25 bp, probe
tgctttgccgctgggacaagagacg

SEQ ID NO: 273335 - DNA, 25 bp, probe
tgcttgtgcctgagctgtcaaaagt

SEQ ID NO: 273336 - DNA, 25 bp, probe
tgcttggcactttgtggcaagattt

SEQ ID NO: 273337 - DNA, 25 bp, probe
tgcgggagtgtacagaacatcttct

SEQ ID NO: 273338 - DNA, 25 bp, probe
tgctgccggtgatgggaggcctttc

SEQ ID NO: 273339 - DNA, 25 bp, probe
tgctctcggctatgtagcagctttt

SEQ ID NO: 273340 - DNA, 25 bp, probe
tgctcacagtcgttatagttttcat

SEQ ID NO: 273341 - DNA, 25 bp, probe
tgctccagtaactacagtggcatta

SEQ ID NO: 273342 - DNA, 25 bp, probe
tgctctcagctaactatcagggtgg

SEQ ID NO: 273343 - DNA, 25 bp, probe
tgcttcctcttcaacagggagctga

SEQ ID NO: 273344 - DNA, 25 bp, probe
tgcttcctcttcaacagggagctga

SEQ ID NO: 273345 - DNA, 25 bp, probe
tgcttctccttgcgcatgaagagta

SEQ ID NO: 273346 - DNA, 25 bp, probe
tgcttcccttgcctgtatggagcat

SEQ ID NO: 273347 - DNA, 25 bp, probe
tgctccacctagctgtagcagacac

SEQ ID NO: 273348 - DNA, 25 bp, probe
tgcttacagctacagtcacatccag

SEQ ID NO: 273349 - DNA, 25 bp, probe
tgcttctgattaccagacagtccag

SEQ ID NO: 273350 - DNA, 25 bp, probe
tgcttgctgactggctcgaaggcca

SEQ ID NO: 273351 - DNA, 25 bp, probe
tgcttgctgactggctcgaaggcca

SEQ ID NO: 273352 - DNA, 25 bp, probe
tgctttgcacatggccagagggcta

SEQ ID NO: 273353 - DNA, 25 bp, probe
tgcttcccagagcacaggtgctacc

SEQ ID NO: 273354 - DNA, 25 bp, probe
tgcattagacagatgacggctgctc

SEQ ID NO: 273355 - DNA, 25 bp, probe
tgcttgggtatgcagcagcctgctc

SEQ ID NO: 273356 - DNA, 25 bp, probe
tgcttgggtatgcagcagcctgctc

SEQ ID NO: 273357 - DNA, 25 bp, probe
tgcattggaggttgctgacctgtgc

SEQ ID NO: 273358 - DNA, 25 bp, probe
tgcattgggacgtctgcacttgagc

SEQ ID NO: 273359 - DNA, 25 bp, probe
tgcttagaggcggctccaagagccc

SEQ ID NO: 273360 - DNA, 25 bp, probe
tgcttcagatgggctgtgcacacgg

SEQ ID NO: 273361 - DNA, 25 bp, probe
tgctacaaggtggtgcaggagtata

SEQ ID NO: 273362 - DNA, 25 bp, probe
tcatgaaatgggatcgttgtacgac

SEQ ID NO: 273363 - DNA, 25 bp, probe
tgctgaaagggatgcttgagtacga

SEQ ID NO: 273364 - DNA, 25 bp, probe
tgctgaacacggtcagcgtggccac

SEQ ID NO: 273365 - DNA, 25 bp, probe
tgctgaactcaatgctgacggccat

SEQ ID NO: 273366 - DNA, 25 bp, probe
tgctgaagatagagctggagaccta

SEQ ID NO: 273367 - DNA, 25 bp, probe
tgctgtagatgactacttgggccat

SEQ ID NO: 273368 - DNA, 25 bp, probe
tgctaagatgcgcatggtggccctc

SEQ ID NO: 273369 - DNA, 25 bp, probe
tgctctgagaggccaggacgtccat

SEQ ID NO: 273370 - DNA, 25 bp, probe
tgctgcaagaggccgggccttcgga

SEQ ID NO: 273371 - DNA, 25 bp, probe
tgctgactgaggtgcacgcagcgtc

SEQ ID NO: 273372 - DNA, 25 bp, probe
tgctgaggaggaccacacgcagttt

SEQ ID NO: 273373 - DNA, 25 bp, probe
tgctgggagagatcccctggcttgc

SEQ ID NO: 273374 - DNA, 25 bp, probe
tgcgggagaagagcggccctatgca

SEQ ID NO: 273375 - DNA, 25 bp, probe
tgctgggcagagcagccggaacttc

SEQ ID NO: 273376 - DNA, 25 bp, probe
tgcgtggagccgggcacagaactgt

SEQ ID NO: 273377 - DNA, 25 bp, probe
tcgtgctggaagaattcaagacgga

SEQ ID NO: 273378 - DNA, 25 bp, probe
tgctgggtatcgaatgtacaggaag

SEQ ID NO: 273379 - DNA, 25 bp, probe
tgctgaaaatcgtatcttaggctag

SEQ ID NO: 273380 - DNA, 25 bp, probe
tgctgaaattcgtgagtcacctgga

SEQ ID NO: 273381 - DNA, 25 bp, probe
tgctgaaactcactagaccgtctgc

SEQ ID NO: 273382 - DNA, 25 bp, probe
tgctgggattacaggcgcgagccac

SEQ ID NO: 273383 - DNA, 25 bp, probe
tgctgggattacaggctgaggcacg

SEQ ID NO: 273384 - DNA, 25 bp, probe
tgctgaaaatccactctgcagaggg

SEQ ID NO: 273385 - DNA, 25 bp, probe
tgctaccagccgaggctgtgcgggc

SEQ ID NO: 273386 - DNA, 25 bp, probe
tgctaccagccgaggctgtgcgggc

SEQ ID NO: 273387 - DNA, 25 bp, probe
tgctaccagcaggtgggctgcctgc

SEQ ID NO: 273388 - DNA, 25 bp, probe
tgctaccagcaggtgggctgcctgc

SEQ ID NO: 273389 - DNA, 25 bp, probe
tgctacccagctggggtgggtgagg

SEQ ID NO: 273390 - DNA, 25 bp, probe
tgctccccgaggtgggagcggcgtt

SEQ ID NO: 273391 - DNA, 25 bp, probe
tgctctcaactgcgtaggtggctgt

SEQ ID NO: 273392 - DNA, 25 bp, probe
tgcttctactcgtcacgtgtttgga

SEQ ID NO: 273393 - DNA, 25 bp, probe
tgcttctactcgtcacgtgtttgga

SEQ ID NO: 273394 - DNA, 25 bp, probe
tgcttgagaccttgaccattttgag

SEQ ID NO: 273395 - DNA, 25 bp, probe
tgctcgagaccttgactgttttgag

SEQ ID NO: 273396 - DNA, 25 bp, probe
tgctcctgaccttgattaacttaac

SEQ ID NO: 273397 - DNA, 25 bp, probe
tgccacgactggcattaccttcaat

SEQ ID NO: 273398 - DNA, 25 bp, probe
tgccactgtttgcttcaacagtata

SEQ ID NO: 273399 - DNA, 25 bp, probe
tgccacttttggactttcatcataa

SEQ ID NO: 273400 - DNA, 25 bp, probe
tgcttttgtgtgcacttgtttaagc

SEQ ID NO: 273401 - DNA, 25 bp, probe
tgctttctgttgttttgtttattgg

SEQ ID NO: 273402 - DNA, 25 bp, probe
tgctttggggttttgtttctgttgt

SEQ ID NO: 273403 - DNA, 25 bp, probe
tgcttctggtggctgttttgctatg

SEQ ID NO: 273404 - DNA, 25 bp, probe
tgctttgtgaggcagtcttgttctt

SEQ ID NO: 273405 - DNA, 25 bp, probe
tgctttggctgtcagtctagaaatg

SEQ ID NO: 273406 - DNA, 25 bp, probe
tgctgttgccaacaactagaacacg

SEQ ID NO: 273407 - DNA, 25 bp, probe
tgctgttgtcaacatgtctggccca

SEQ ID NO: 273408 - DNA, 25 bp, probe
tgcttggtcaaggtgagcggcacag

SEQ ID NO: 273409 - DNA, 25 bp, probe
tgctctgtgacaaggctacgctgac

SEQ ID NO: 273410 - DNA, 25 bp, probe
tgctttcactgcaccatcagtgcac

SEQ ID NO: 273411 - DNA, 25 bp, probe
tgctttatgcctgcgcagcaggagc

SEQ ID NO: 273412 - DNA, 25 bp, probe
tgctttatggcaggcgcaaactcga

SEQ ID NO: 273413 - DNA, 25 bp, probe
tgctctgtaggcagcgttaggcgtt

SEQ ID NO: 273414 - DNA, 25 bp, probe
tgcttgaactctgggcttggtgcag

SEQ ID NO: 273415 - DNA, 25 bp, probe
tgcttgagacctagcaatcagtcag

SEQ ID NO: 273416 - DNA, 25 bp, probe
tgctcggattcaagcagctgcttca

SEQ ID NO: 273417 - DNA, 25 bp, probe
tgctagcactccaagcagcagacca

SEQ ID NO: 273418 - DNA, 25 bp, probe
tgcttagctgccaggcagatgtcaa

SEQ ID NO: 273419 - DNA, 25 bp, probe
tgctcctgtgctgagccaggctaag

SEQ ID NO: 273420 - DNA, 25 bp, probe
tgctgtgtgtcctgcatcaagaagg

SEQ ID NO: 273421 - DNA, 25 bp, probe
tgctgtgtgtcctgcatcaagaagg

SEQ ID NO: 273422 - DNA, 25 bp, probe
tgctctgtatccagacacacttggc

SEQ ID NO: 273423 - DNA, 25 bp, probe
tgctgtgttccatacagccttggac

SEQ ID NO: 273424 - DNA, 25 bp, probe
tgcgggatgtacgacattttgtgac

SEQ ID NO: 273425 - DNA, 25 bp, probe
tcgggtggaccaaattgtgggtcgg

SEQ ID NO: 273426 - DNA, 25 bp, probe
tcgggtggaccaaattgtgggtcgg

SEQ ID NO: 273427 - DNA, 25 bp, probe
tgcgggtattccaaattctcttgtg

SEQ ID NO: 273428 - DNA, 25 bp, probe
tgctgacgtttgaagacctcctttg

SEQ ID NO: 273429 - DNA, 25 bp, probe
tgcgactgtggtaaccaccttcttc

SEQ ID NO: 273430 - DNA, 25 bp, probe
tgcgactgtggtaaccaccttcttc

SEQ ID NO: 273431 - DNA, 25 bp, probe
tgcgaatctgacttacgccattatt

SEQ ID NO: 273432 - DNA, 25 bp, probe
tgctaatgctcagagatcttttttc

SEQ ID NO: 273433 - DNA, 25 bp, probe
tgctttcagcagagaatttatttca

SEQ ID NO: 273434 - DNA, 25 bp, probe
tgcttccatggacaagtccttgtca

SEQ ID NO: 273435 - DNA, 25 bp, probe
tgctagcgtggacatagccctgtga

SEQ ID NO: 273436 - DNA, 25 bp, probe
tgctcacggagaagtccgcctgtaa

SEQ ID NO: 273437 - DNA, 25 bp, probe
tgctattaagcaagttcctgtggaa

SEQ ID NO: 273438 - DNA, 25 bp, probe
tgctttagagtacttgcacggcaag

SEQ ID NO: 273439 - DNA, 25 bp, probe
tgcttatcggtactgcccagaagga

SEQ ID NO: 273440 - DNA, 25 bp, probe
tgctcttcagagatgctcccaaagc

SEQ ID NO: 273441 - DNA, 25 bp, probe
tgctcttcagagatgctcccaaagc

SEQ ID NO: 273442 - DNA, 25 bp, probe
tgctcctgctagagtagccacatcc

SEQ ID NO: 273443 - DNA, 25 bp, probe
tgctacagctaaagtcatcaccgac

SEQ ID NO: 273444 - DNA, 25 bp, probe
tgctacgtcaacagcaccatcaacc

SEQ ID NO: 273445 - DNA, 25 bp, probe
tgctacgtggagatcctcaggaccc

SEQ ID NO: 273446 - DNA, 25 bp, probe
tgctacggtgagttcattcccagcg

SEQ ID NO: 273447 - DNA, 25 bp, probe
tgctgacggacacgtcgtacacgcg

SEQ ID NO: 273448 - DNA, 25 bp, probe
tgctgccttgacagttcatcttcag

SEQ ID NO: 273449 - DNA, 25 bp, probe
tgctgccatttccagttatcgagcc

SEQ ID NO: 273450 - DNA, 25 bp, probe
tgctcagattctaagttgttggcct

SEQ ID NO: 273451 - DNA, 25 bp, probe
tgctcagcgttcatgttgttgggta

SEQ ID NO: 273452 - DNA, 25 bp, probe
tgctgcagctgaagctcatgatgtg

SEQ ID NO: 273453 - DNA, 25 bp, probe
tgctgagcattgccatcatctctgc

SEQ ID NO: 273454 - DNA, 25 bp, probe
tgctagatctggtcagcttgctggt

SEQ ID NO: 273455 - DNA, 25 bp, probe
tgctagatctggtcagcttgctggt

SEQ ID NO: 273456 - DNA, 25 bp, probe
tgctggacatggacatggaggggca

SEQ ID NO: 273457 - DNA, 25 bp, probe
tgctggacaaagggttgggcccctt

SEQ ID NO: 273458 - DNA, 25 bp, probe
tgctggacaaagggttgggcccctt

SEQ ID NO: 273459 - DNA, 25 bp, probe
tctaaaaggtagttggggcacactt

SEQ ID NO: 273460 - DNA, 25 bp, probe
tgccaaaagctatgggtgggctcag

SEQ ID NO: 273461 - DNA, 25 bp, probe
tgctcatgaccgacaagggttgtgt

SEQ ID NO: 273462 - DNA, 25 bp, probe
tgctcatgaccgacaagggttgtgt

SEQ ID NO: 273463 - DNA, 25 bp, probe
tgctcaacatcgtcaacgtggtgtg

SEQ ID NO: 273464 - DNA, 25 bp, probe
tgctcaccactactaggggtggcat

SEQ ID NO: 273465 - DNA, 25 bp, probe
tgctgccgctaacagtggagttatg

SEQ ID NO: 273466 - DNA, 25 bp, probe
tgctcttccaaacctggtgtctatc

SEQ ID NO: 273467 - DNA, 25 bp, probe
tgctccaccgaagcggaattctcca

SEQ ID NO: 273468 - DNA, 25 bp, probe
tgcgctccggaatccggattgccca

SEQ ID NO: 273469 - DNA, 25 bp, probe
tgctctccaaaatggtggttggaca

SEQ ID NO: 273470 - DNA, 25 bp, probe
tgcccgcagacctctggattaggtc

SEQ ID NO: 273471 - DNA, 25 bp, probe
tgcccgcagacctctggattaggtc

SEQ ID NO: 273472 - DNA, 25 bp, probe
tgctccgatcccactagtgagaggt

SEQ ID NO: 273473 - DNA, 25 bp, probe
tgctcgcagaccaacagccagagaa

SEQ ID NO: 273474 - DNA, 25 bp, probe
tgctacagagcagacagttaagaga

SEQ ID NO: 273475 - DNA, 25 bp, probe
tgctaccagtgcaaagctgctaaag

SEQ ID NO: 273476 - DNA, 25 bp, probe
tgctacgtgctcatcattgctaaga

SEQ ID NO: 273477 - DNA, 25 bp, probe
tgctgacctgtgcgattgctgtagc

SEQ ID NO: 273478 - DNA, 25 bp, probe
tgctgcacaggtcaatgccttcgtt

SEQ ID NO: 273479 - DNA, 25 bp, probe
tgctcctcgtcagttgacttgtttt

SEQ ID NO: 273480 - DNA, 25 bp, probe
tgctcaattttggtcctgctgtttt

SEQ ID NO: 273481 - DNA, 25 bp, probe
tgcttttattcagcatcctttatct

SEQ ID NO: 273482 - DNA, 25 bp, probe
tgcttttcaataggaatcattcttc

SEQ ID NO: 273483 - DNA, 25 bp, probe
tgcttatatttaggaacatatgctc

SEQ ID NO: 273484 - DNA, 25 bp, probe
tgctttcatttacacagatatccat

SEQ ID NO: 273485 - DNA, 25 bp, probe
tgctttcatttacacagatatccat

SEQ ID NO: 273486 - DNA, 25 bp, probe
tgctttcctgtttatctatactcag

SEQ ID NO: 273487 - DNA, 25 bp, probe
tgctttccgtggcactgcatacaat

SEQ ID NO: 273488 - DNA, 25 bp, probe
tgctgtctccgtggacaggtacctg

SEQ ID NO: 273489 - DNA, 25 bp, probe
tgctgtaacacttgaccttaacttt

SEQ ID NO: 273490 - DNA, 25 bp, probe
tgctgacaaacttatcccaaaactt

SEQ ID NO: 273491 - DNA, 25 bp, probe
tgctggagaaccgatcccttagacc

SEQ ID NO: 273492 - DNA, 25 bp, probe
tgctgggagagccacagccttggga

SEQ ID NO: 273493 - DNA, 25 bp, probe
tgctgcaactggcaaacctgccgac

SEQ ID NO: 273494 - DNA, 25 bp, probe
tgctgagacgctgaacaacatcctg

SEQ ID NO: 273495 - DNA, 25 bp, probe
tgctggtcttctaccatagtccagt

SEQ ID NO: 273496 - DNA, 25 bp, probe
tgcttttctctgtccacagtcaatg

SEQ ID NO: 273497 - DNA, 25 bp, probe
tgctttggtctgatccctcagagga

SEQ ID NO: 273498 - DNA, 25 bp, probe
tgctttggtctgatccctcagagga

SEQ ID NO: 273499 - DNA, 25 bp, probe
tgctgtatggactcatccaccaggg

SEQ ID NO: 273500 - DNA, 25 bp, probe
tgctccatgaactcaaacaccaggc

SEQ ID NO: 273501 - DNA, 25 bp, probe
tgctccatgaactcaaacaccaggc

SEQ ID NO: 273502 - DNA, 25 bp, probe
tgcttcatgaacaaacgcttccgcc

SEQ ID NO: 273503 - DNA, 25 bp, probe
tgctgttgaaccatagcttcaccct

SEQ ID NO: 273504 - DNA, 25 bp, probe
tgctggaggtccacaggtcaactgc

SEQ ID NO: 273505 - DNA, 25 bp, probe
tgctgtggttcggaagtctaagcag

SEQ ID NO: 273506 - DNA, 25 bp, probe
tgctgtgattcttcgaaatctcaaa

SEQ ID NO: 273507 - DNA, 25 bp, probe
tgcttagctcttcgatacttacaca

SEQ ID NO: 273508 - DNA, 25 bp, probe
tgctgtctttattatacttaccctt

SEQ ID NO: 273509 - DNA, 25 bp, probe
tgctgtttttccattctacaccatg

SEQ ID NO: 273510 - DNA, 25 bp, probe
tgcctttactccttttaaacaccag

SEQ ID NO: 273511 - DNA, 25 bp, probe
tgcgtttactcttgttttcaaaggg

SEQ ID NO: 273512 - DNA, 25 bp, probe
tgctttcatccccttttgtaatgga

SEQ ID NO: 273513 - DNA, 25 bp, probe
tgctcaatcagcagcctttggtgaa

SEQ ID NO: 273514 - DNA, 25 bp, probe
tgctcttcactggcacgtgggtgag

SEQ ID NO: 273515 - DNA, 25 bp, probe
tgctcagcttctcagcgggattagc

SEQ ID NO: 273516 - DNA, 25 bp, probe
tgctcactcaggcatgctggtattc

SEQ ID NO: 273517 - DNA, 25 bp, probe
tgctccatgatgccaatgcaggtgg

SEQ ID NO: 273518 - DNA, 25 bp, probe
tgctctacgagatgctggtgggtga

SEQ ID NO: 273519 - DNA, 25 bp, probe
tgctctacgagatgctggtgggtga

SEQ ID NO: 273520 - DNA, 25 bp, probe
tgctctacgtcatcgagaacgagat

SEQ ID NO: 273521 - DNA, 25 bp, probe
tgctctacgtcatcgagaacgagat

SEQ ID NO: 273522 - DNA, 25 bp, probe
tgctccaggctgcattgagaatcga

SEQ ID NO: 273523 - DNA, 25 bp, probe
tgctcatgctgggctttcaaatgca

SEQ ID NO: 273524 - DNA, 25 bp, probe
tgctattggttcagcaagagaggca

SEQ ID NO: 273525 - DNA, 25 bp, probe
tgctacgtggccagcacggatgcag

SEQ ID NO: 273526 - DNA, 25 bp, probe
tgctgtccgaggtgcagctgcaaca

SEQ ID NO: 273527 - DNA, 25 bp, probe
tgctgtccgaggtgcagctgcaaca

SEQ ID NO: 273528 - DNA, 25 bp, probe
tgctgtcgggactgagcaggcaatg

SEQ ID NO: 273529 - DNA, 25 bp, probe
tgctgtcggcctatgagcctaatga

SEQ ID NO: 273530 - DNA, 25 bp, probe
tgctggggttgttggcctgaagatg

SEQ ID NO: 273531 - DNA, 25 bp, probe
tgcgggagattaaggctctgcagga

SEQ ID NO: 273532 - DNA, 25 bp, probe
tgctgaggcacaatggcagccctgc

SEQ ID NO: 273533 - DNA, 25 bp, probe
tgctgcagtggtatgagccgctgca

SEQ ID NO: 273534 - DNA, 25 bp, probe
tgctgcagggctcctatgggacagc

SEQ ID NO: 273535 - DNA, 25 bp, probe
tgctgaaggcatcctctgtgttcaa

SEQ ID NO: 273536 - DNA, 25 bp, probe
tgctcaagaggcaacgctctctcta

SEQ ID NO: 273537 - DNA, 25 bp, probe
tgctgggagcagaacagtccctcac

SEQ ID NO: 273538 - DNA, 25 bp, probe
tcccgaggaaagtctcagtccaaac

SEQ ID NO: 273539 - DNA, 25 bp, probe
tgcgctgctggaaaaaccgtccgga

SEQ ID NO: 273540 - DNA, 25 bp, probe
tccagtggaggaaaccaaaggagaa

SEQ ID NO: 273541 - DNA, 25 bp, probe
tccaggcgaggctcctaatggccaa

SEQ ID NO: 273542 - DNA, 25 bp, probe
tgctgaacgggctcctagatcgccc

SEQ ID NO: 273543 - DNA, 25 bp, probe
tgctgaacgggctcctagatcgccc

SEQ ID NO: 273544 - DNA, 25 bp, probe
tgctaccaaggcccagctatggccc

SEQ ID NO: 273545 - DNA, 25 bp, probe
tgcgtgtctgggccgagtatgaccc

SEQ ID NO: 273546 - DNA, 25 bp, probe
tgcgcgactggcacgatttagaccc

SEQ ID NO: 273547 - DNA, 25 bp, probe
tgcggaccctcctattagagtacga

SEQ ID NO: 273548 - DNA, 25 bp, probe
tgcggccccttcatttgattgtggg

SEQ ID NO: 273549 - DNA, 25 bp, probe
tgcggcatcccaacattgtgcatat

SEQ ID NO: 273550 - DNA, 25 bp, probe
tgcgtcatccgaacatcgtggagct

SEQ ID NO: 273551 - DNA, 25 bp, probe
tgcgaactggtgacctgtaggccat

SEQ ID NO: 273552 - DNA, 25 bp, probe
tgctgaaaggtacctgccaggcaca

SEQ ID NO: 273553 - DNA, 25 bp, probe
tgctgactactgtacttccagaccc

SEQ ID NO: 273554 - DNA, 25 bp, probe
tgctgaataatgtacgggacttcct

SEQ ID NO: 273555 - DNA, 25 bp, probe
tgctaatcaaagccagggtctctcc

SEQ ID NO: 273556 - DNA, 25 bp, probe
tgctagcaaagagagctgtgtggct

SEQ ID NO: 273557 - DNA, 25 bp, probe
tgctacacgacacacatgtctcgtc

SEQ ID NO: 273558 - DNA, 25 bp, probe
tgctacacgacacacatgtctcgtc

SEQ ID NO: 273559 - DNA, 25 bp, probe
tgctgatcatcgccagaggtgcttc

SEQ ID NO: 273560 - DNA, 25 bp, probe
tgcggctgccgaatggtgtacatgc

SEQ ID NO: 273561 - DNA, 25 bp, probe
tgctggcgctggatgtggattccac

SEQ ID NO: 273562 - DNA, 25 bp, probe
tgctggcgctggatgtggattccac

SEQ ID NO: 273563 - DNA, 25 bp, probe
tgctggttgattgggccatatgccc

SEQ ID NO: 273564 - DNA, 25 bp, probe
tgctggttgattgggccatatgccc

SEQ ID NO: 273565 - DNA, 25 bp, probe
tgctgaccttcggagccaaggctaa

SEQ ID NO: 273566 - DNA, 25 bp, probe
tgctgaccttcggagccaaggctaa

SEQ ID NO: 273567 - DNA, 25 bp, probe
tgctactcttgtcagacaatggcta

SEQ ID NO: 273568 - DNA, 25 bp, probe
tgctcagccctgaggacagatgcct

SEQ ID NO: 273569 - DNA, 25 bp, probe
tgctcagccttgatgaaagctacca

SEQ ID NO: 273570 - DNA, 25 bp, probe
tgctgcgggatcagcaacgctacca

SEQ ID NO: 273571 - DNA, 25 bp, probe
tgctgcgggtgcagcacggaaaccc

SEQ ID NO: 273572 - DNA, 25 bp, probe
tgctctggggcacaccaaaatcatg

SEQ ID NO: 273573 - DNA, 25 bp, probe
tgctctggggcacaccaaaatcatg

SEQ ID NO: 273574 - DNA, 25 bp, probe
tgctctggcgggcaggacacaaact

SEQ ID NO: 273575 - DNA, 25 bp, probe
tgcgtgcacggaggaagacagccaa

SEQ ID NO: 273576 - DNA, 25 bp, probe
tgcgtacctcatgaaataccactcc

SEQ ID NO: 273577 - DNA, 25 bp, probe
tgcgtacctcatgaaataccactcc

SEQ ID NO: 273578 - DNA, 25 bp, probe
tgccgacctgatggaaccactactg

SEQ ID NO: 273579 - DNA, 25 bp, probe
tgcctgggcgttaacagcctttgga

SEQ ID NO: 273580 - DNA, 25 bp, probe
tgctgcagggagatgaaaggctttg

SEQ ID NO: 273581 - DNA, 25 bp, probe
tgctgggagtagaaagggctttatg

SEQ ID NO: 273582 - DNA, 25 bp, probe
tgctgggggaccagggctgtggtgc

SEQ ID NO: 273583 - DNA, 25 bp, probe
tgctgtggggacctgattgggggag

SEQ ID NO: 273584 - DNA, 25 bp, probe
tgctgatggggctgtgcattgagga

SEQ ID NO: 273585 - DNA, 25 bp, probe
tgctaggcagggctgctctcagcaa

SEQ ID NO: 273586 - DNA, 25 bp, probe
tgcgggtgaagactctgctgcagat

SEQ ID NO: 273587 - DNA, 25 bp, probe
tgcggtgtgtgcaggcatcgcagat

SEQ ID NO: 273588 - DNA, 25 bp, probe
tgctacggcgcaagagcctgcagtg

SEQ ID NO: 273589 - DNA, 25 bp, probe
tgctacggcgcaagagcctgcagtg

SEQ ID NO: 273590 - DNA, 25 bp, probe
tgctgctcgggaaggcctgagggaa

SEQ ID NO: 273591 - DNA, 25 bp, probe
tgctctcggagcagggtgatgtgaa

SEQ ID NO: 273592 - DNA, 25 bp, probe
tgctctcggagcagggtgatgtgaa

SEQ ID NO: 273593 - DNA, 25 bp, probe
tgctctggagaggctgtggctggga

SEQ ID NO: 273594 - DNA, 25 bp, probe
tgctctggagaggctgtggctggga

SEQ ID NO: 273595 - DNA, 25 bp, probe
tgctcagtctgaggcaaggctgtgg

SEQ ID NO: 273596 - DNA, 25 bp, probe
tgctcagtctgaggctgatgatcta

SEQ ID NO: 273597 - DNA, 25 bp, probe
tgctcagtgcaggttatatcaggtc

SEQ ID NO: 273598 - DNA, 25 bp, probe
tgctcatgtgaggctgttgctcagc

SEQ ID NO: 273599 - DNA, 25 bp, probe
tgctgagatgatcatgagttcatgc

SEQ ID NO: 273600 - DNA, 25 bp, probe
tgctgagcaatgtcgtcttcatggc

SEQ ID NO: 273601 - DNA, 25 bp, probe
tgctgcgaatcctctcgcagcgcag

SEQ ID NO: 273602 - DNA, 25 bp, probe
tgctgcgaatcctctcgcagcgcag

SEQ ID NO: 273603 - DNA, 25 bp, probe
tgctggacatcaacactgtggtcag

SEQ ID NO: 273604 - DNA, 25 bp, probe
tgctggacatcaacactgtggtcag

SEQ ID NO: 273605 - DNA, 25 bp, probe
tgctggctacacatttggacaagac

SEQ ID NO: 273606 - DNA, 25 bp, probe
tgcgtctcagacatgttgagaatca

SEQ ID NO: 273607 - DNA, 25 bp, probe
tgctgatctagaggtgcaggagaaa

SEQ ID NO: 273608 - DNA, 25 bp, probe
tgctgactgagctgctgcagttcga

SEQ ID NO: 273609 - DNA, 25 bp, probe
tgctcctggcaactacttcaaggtt

SEQ ID NO: 273610 - DNA, 25 bp, probe
tgccggagaacgtcttcatcagcgt

SEQ ID NO: 273611 - DNA, 25 bp, probe
tgctaggcatggtgtcttcacagga

SEQ ID NO: 273612 - DNA, 25 bp, probe
tgctgggcatggagcgcaacgagcc

SEQ ID NO: 273613 - DNA, 25 bp, probe
tgctgtggttgcagccacaggggca

SEQ ID NO: 273614 - DNA, 25 bp, probe
tgctgaggttccccatcatgggcaa

SEQ ID NO: 273615 - DNA, 25 bp, probe
tgctcactttccccaatgaatgtca

SEQ ID NO: 273616 - DNA, 25 bp, probe
tgctcctttccaccagtgatttgta

SEQ ID NO: 273617 - DNA, 25 bp, probe
tgcccttatctcaaagtccgtggct

SEQ ID NO: 273618 - DNA, 25 bp, probe
tgccctttacagaatcactcgagcc

SEQ ID NO: 273619 - DNA, 25 bp, probe
tgcgcctgtataactatttccatga

SEQ ID NO: 273620 - DNA, 25 bp, probe
tgcccgcatctatagtttccagatg

SEQ ID NO: 273621 - DNA, 25 bp, probe
tgctactctcaacgagttcccagag

SEQ ID NO: 273622 - DNA, 25 bp, probe
tgctgacactaatattctcttagaa

SEQ ID NO: 273623 - DNA, 25 bp, probe
tgctaatccttatttcttctaaatt

SEQ ID NO: 273624 - DNA, 25 bp, probe
tgctgactcccttagtctagaaaat

SEQ ID NO: 273625 - DNA, 25 bp, probe
tgctgccaccaaatctgtctagaat

SEQ ID NO: 273626 - DNA, 25 bp, probe
tgctgccaccaaatctgtctagaat

SEQ ID NO: 273627 - DNA, 25 bp, probe
tgcccacctaccacatgaggatatc

SEQ ID NO: 273628 - DNA, 25 bp, probe
tccaccctcactctatgggaagcgc

SEQ ID NO: 273629 - DNA, 25 bp, probe
tgctgcaccccctcaaggtgaagag

SEQ ID NO: 273630 - DNA, 25 bp, probe
tgctgcaccccctcaaggtgaagag

SEQ ID NO: 273631 - DNA, 25 bp, probe
tgctggtcctcagactgttctgaag

SEQ ID NO: 273632 - DNA, 25 bp, probe
tgctggacgaacaccattcaaagat

SEQ ID NO: 273633 - DNA, 25 bp, probe
tgctggacgaaagcctgaacaaaaa

SEQ ID NO: 273634 - DNA, 25 bp, probe
tgcggatcaagaagacactacaaaa

SEQ ID NO: 273635 - DNA, 25 bp, probe
tgctgcccaagaacatcacgtgcat

SEQ ID NO: 273636 - DNA, 25 bp, probe
tgctgctccaggagcatccacatcc

SEQ ID NO: 273637 - DNA, 25 bp, probe
tgctctaagtgaagatacaggccac

SEQ ID NO: 273638 - DNA, 25 bp, probe
tgctctcaagggcatacatggtgat

SEQ ID NO: 273639 - DNA, 25 bp, probe
tgctgctctcaagggcatacatggt

SEQ ID NO: 273640 - DNA, 25 bp, probe
tgctgctctcaagggcatacatggt

SEQ ID NO: 273641 - DNA, 25 bp, probe
tgctgcctcaatgggacaaatgtgt

SEQ ID NO: 273642 - DNA, 25 bp, probe
tgctgcctcatgctaagactcagtg

SEQ ID NO: 273643 - DNA, 25 bp, probe
tgctgcgatatgaccaccagtcacg

SEQ ID NO: 273644 - DNA, 25 bp, probe
tgctgaccatgtccacaatcatcac

SEQ ID NO: 273645 - DNA, 25 bp, probe
tgctgaccactgactcagctctgac

SEQ ID NO: 273646 - DNA, 25 bp, probe
tgctgaccactgactcagctctgac

SEQ ID NO: 273647 - DNA, 25 bp, probe
tgctcaaagctgtgcagcatcagca

SEQ ID NO: 273648 - DNA, 25 bp, probe
tgctggaagtgagtggcccaccaga

SEQ ID NO: 273649 - DNA, 25 bp, probe
tgctggcaagtggttctcccagctg

SEQ ID NO: 273650 - DNA, 25 bp, probe
tgctggttgtggactatgccacctg

SEQ ID NO: 273651 - DNA, 25 bp, probe
tgctcgtggctgagatcatgcccgc

SEQ ID NO: 273652 - DNA, 25 bp, probe
tgctctgaggtactactgcctctgc

SEQ ID NO: 273653 - DNA, 25 bp, probe
tgctgctaaatgtaaatgccttctc

SEQ ID NO: 273654 - DNA, 25 bp, probe
tgctctaaaagaatatggcgtcatg

SEQ ID NO: 273655 - DNA, 25 bp, probe
tgctctacaagaatatggggtcatg

SEQ ID NO: 273656 - DNA, 25 bp, probe
tgctgctacaagatgtttctgtttc

SEQ ID NO: 273657 - DNA, 25 bp, probe
tgctgctacaagatgtttctgtttc

SEQ ID NO: 273658 - DNA, 25 bp, probe
tgctctcgacagattcttcttgtgt

SEQ ID NO: 273659 - DNA, 25 bp, probe
tgctctgaccgattcctttatattt

SEQ ID NO: 273660 - DNA, 25 bp, probe
tgctccaaacgaccattttatcttc

SEQ ID NO: 273661 - DNA, 25 bp, probe
tgctcccaaggacgatgggttcctc

SEQ ID NO: 273662 - DNA, 25 bp, probe
tgccaggcaaggtgaaccctactca

SEQ ID NO: 273663 - DNA, 25 bp, probe
tccaggcagtggtttttcctttcgg

SEQ ID NO: 273664 - DNA, 25 bp, probe
tccaggcagtggtttttcctttcgg

SEQ ID NO: 273665 - DNA, 25 bp, probe
tgccagccaggtattttaagattct

SEQ ID NO: 273666 - DNA, 25 bp, probe
tgctaccagtctccattttgcaaat

SEQ ID NO: 273667 - DNA, 25 bp, probe
tgctcccaatccctatttgagaaac

SEQ ID NO: 273668 - DNA, 25 bp, probe
tgctgcccaagggccaatcgcgagt

SEQ ID NO: 273669 - DNA, 25 bp, probe
tgctgcggaccaggacaagcagcga

SEQ ID NO: 273670 - DNA, 25 bp, probe
tgcgggagctcagtgtagctgaaga

SEQ ID NO: 273671 - DNA, 25 bp, probe
tgccgtggctcaggtggatctaaaa

SEQ ID NO: 273672 - DNA, 25 bp, probe
tgctgctgtttcatgtggactgaat

SEQ ID NO: 273673 - DNA, 25 bp, probe
tgctgctgcttccattgctggcagc

SEQ ID NO: 273674 - DNA, 25 bp, probe
tgctgcctgctcatgtgaggctgtt

SEQ ID NO: 273675 - DNA, 25 bp, probe
tgcgcctgctggaagatgccgatta

SEQ ID NO: 273676 - DNA, 25 bp, probe
tgctgctcctgaccaatggaaatat

SEQ ID NO: 273677 - DNA, 25 bp, probe
tgctgctctctatcagttaatgctg

SEQ ID NO: 273678 - DNA, 25 bp, probe
tgctcatttaatagatattcactga

SEQ ID NO: 273679 - DNA, 25 bp, probe
tgctcatgctgacttaaaacactag

SEQ ID NO: 273680 - DNA, 25 bp, probe
tgctcagctgacatttaacactccc

SEQ ID NO: 273681 - DNA, 25 bp, probe
tgctgagtaaatatggagccttcaa

SEQ ID NO: 273682 - DNA, 25 bp, probe
tgcggacaccaaatggaggactcaa

SEQ ID NO: 273683 - DNA, 25 bp, probe
tgcgtgtaatgtttgcctggatcca

SEQ ID NO: 273684 - DNA, 25 bp, probe
tgctgtttagtgatggcactgtcca

SEQ ID NO: 273685 - DNA, 25 bp, probe
tgcgtgttaggaacaaggtgcacca

SEQ ID NO: 273686 - DNA, 25 bp, probe
tgcgtgttaggaacgtcaaagaaag

SEQ ID NO: 273687 - DNA, 25 bp, probe
tgccttagaggagcccacggctaag

SEQ ID NO: 273688 - DNA, 25 bp, probe
tgcctttgcccagaactggtgcatc

SEQ ID NO: 273689 - DNA, 25 bp, probe
tgctcttactgcaggaagtttatct

SEQ ID NO: 273690 - DNA, 25 bp, probe
tgctcttatcttctcaaattgtatt

SEQ ID NO: 273691 - DNA, 25 bp, probe
tgcctcctttgtgcaaattaaattt

SEQ ID NO: 273692 - DNA, 25 bp, probe
tccccttagttcccattaaaatatg

SEQ ID NO: 273693 - DNA, 25 bp, probe
tacccttggcctttacagaaaatat

SEQ ID NO: 273694 - DNA, 25 bp, probe
tattatttagctgttaagtaactat

SEQ ID NO: 273695 - DNA, 25 bp, probe
ttagcttgacccctcaaagtaactt

SEQ ID NO: 273696 - DNA, 25 bp, probe
tctagttgaaccctgggaacaattt

SEQ ID NO: 273697 - DNA, 25 bp, probe
tgctgagaatgatccctactcaaaa

SEQ ID NO: 273698 - DNA, 25 bp, probe
tgctgaagtgcagttcccaccaaaa

SEQ ID NO: 273699 - DNA, 25 bp, probe
tgctgacacatcattcccagcatcc

SEQ ID NO: 273700 - DNA, 25 bp, probe
tgctgacacatcattcccagcatcc

SEQ ID NO: 273701 - DNA, 25 bp, probe
tgctaacatcttaatacacactttg

SEQ ID NO: 273702 - DNA, 25 bp, probe
tgctacctctgatcaaagcaccttg

SEQ ID NO: 273703 - DNA, 25 bp, probe
tgctcaggccgattccaaacattgt

SEQ ID NO: 273704 - DNA, 25 bp, probe
tgctggagtatgctgccataaattt

SEQ ID NO: 273705 - DNA, 25 bp, probe
tgctgtgaggctgtcctgtacattg

SEQ ID NO: 273706 - DNA, 25 bp, probe
tgctgggtgctattacagttgcttg

SEQ ID NO: 273707 - DNA, 25 bp, probe
tgctggttgctggattatgggtggt

SEQ ID NO: 273708 - DNA, 25 bp, probe
tgctggtggtggttctggcatttat

SEQ ID NO: 273709 - DNA, 25 bp, probe
tgctgggttcagtatgggttaaaaa

SEQ ID NO: 273710 - DNA, 25 bp, probe
tgctgggctctggacaggtggtaaa

SEQ ID NO: 273711 - DNA, 25 bp, probe
tgctggagcacatccaggctgcagt

SEQ ID NO: 273712 - DNA, 25 bp, probe
tgctgagaaccatcaagcgcaggga

SEQ ID NO: 273713 - DNA, 25 bp, probe
tgctctgtgactacccaggcagatg

SEQ ID NO: 273714 - DNA, 25 bp, probe
tgctctatgacagcgacgccaagac

SEQ ID NO: 273715 - DNA, 25 bp, probe
tgctccatgagctcttatgccagaa

SEQ ID NO: 273716 - DNA, 25 bp, probe
tgctccatgagctcttatgccagaa

SEQ ID NO: 273717 - DNA, 25 bp, probe
tgctccatgagctcttatgccagaa

SEQ ID NO: 273718 - DNA, 25 bp, probe
tgctctgaagcatctagtacttatc

SEQ ID NO: 273719 - DNA, 25 bp, probe
tgctctgaagcatctagtacttatc

SEQ ID NO: 273720 - DNA, 25 bp, probe
tgctgtgtagatgccacaaccttcc

SEQ ID NO: 273721 - DNA, 25 bp, probe
tgctgggcgatctcatcaaggtgac

SEQ ID NO: 273722 - DNA, 25 bp, probe
tgctcgacgatgttccattggtgga

SEQ ID NO: 273723 - DNA, 25 bp, probe
tgctcgacgatgttccattggtgga

SEQ ID NO: 273724 - DNA, 25 bp, probe
tgctgccacagtctccattgagatg

SEQ ID NO: 273725 - DNA, 25 bp, probe
tgctgccacagtctccattgagatg

SEQ ID NO: 273726 - DNA, 25 bp, probe
tgctcctgcgtggtcatcaggacga

SEQ ID NO: 273727 - DNA, 25 bp, probe
tgctcctatggagtcacataagcca

SEQ ID NO: 273728 - DNA, 25 bp, probe
tgctccttggcttctgaaggctgaa

SEQ ID NO: 273729 - DNA, 25 bp, probe
tgctccaagtctatgaactgttaaa

SEQ ID NO: 273730 - DNA, 25 bp, probe
tgctctccagtaactaactaactaa

SEQ ID NO: 273731 - DNA, 25 bp, probe
tgctctccagtaccataacattatg

SEQ ID NO: 273732 - DNA, 25 bp, probe
tgctcctgcctgattcaactgtagc

SEQ ID NO: 273733 - DNA, 25 bp, probe
tgctcctgcctgattcaactgtagc

SEQ ID NO: 273734 - DNA, 25 bp, probe
tgctcatctcctaagtagctcttca

SEQ ID NO: 273735 - DNA, 25 bp, probe
tgctccttgttagtggctgcatcat

SEQ ID NO: 273736 - DNA, 25 bp, probe
tgcccattgtttggttgccagtcat

SEQ ID NO: 273737 - DNA, 25 bp, probe
tgctcttctgtgattattgtcatgt

SEQ ID NO: 273738 - DNA, 25 bp, probe
tgctctgtttgcctcatttggtgat

SEQ ID NO: 273739 - DNA, 25 bp, probe
tgctggtttgagacctattctgacc

SEQ ID NO: 273740 - DNA, 25 bp, probe
tgctggtttaaacattcagcaccaa

SEQ ID NO: 273741 - DNA, 25 bp, probe
tgctggtgtttacagtgtgcccaca

SEQ ID NO: 273742 - DNA, 25 bp, probe
tgctgcatttcagagaacgcctccc

SEQ ID NO: 273743 - DNA, 25 bp, probe
tgcgagccacatgaagacgcgtgcc

SEQ ID NO: 273744 - DNA, 25 bp, probe
tgctgctcgcaaggaagtccaggcc

SEQ ID NO: 273745 - DNA, 25 bp, probe
tgctgctcgcaaggaagtccaggcc

SEQ ID NO: 273746 - DNA, 25 bp, probe
tgcgcttcaagcgaatttccggcac

SEQ ID NO: 273747 - DNA, 25 bp, probe
tgctcgtgaagctcaatagccaggc

SEQ ID NO: 273748 - DNA, 25 bp, probe
tgctggtcagcactccagtagcgag

SEQ ID NO: 273749 - DNA, 25 bp, probe
tgctcgaaactgcatgttgcgagat

SEQ ID NO: 273750 - DNA, 25 bp, probe
tgctcggaactgcctggtgacagag

SEQ ID NO: 273751 - DNA, 25 bp, probe
tgctcctggacatgcggtactgagg

SEQ ID NO: 273752 - DNA, 25 bp, probe
tgcggtgaagattatggaagtgaca

SEQ ID NO: 273753 - DNA, 25 bp, probe
tgctggcataacatactatttgaat

SEQ ID NO: 273754 - DNA, 25 bp, probe
tgctgggtacaatgcttctatgaat

SEQ ID NO: 273755 - DNA, 25 bp, probe
tgctggggaaagtccctcgaaaata

SEQ ID NO: 273756 - DNA, 25 bp, probe
tgctggggcacatttcacatatcga

SEQ ID NO: 273757 - DNA, 25 bp, probe
tgcggcggcaatcgtgcgcaatgaa

SEQ ID NO: 273758 - DNA, 25 bp, probe
tgctggtggcaaggtcaccatggat

SEQ ID NO: 273759 - DNA, 25 bp, probe
tgctgctgtccatggtagtcagtat

SEQ ID NO: 273760 - DNA, 25 bp, probe
tgctgctgtgccagtatcggaacat

SEQ ID NO: 273761 - DNA, 25 bp, probe
tgctgctagccagtgtctgcatgag

SEQ ID NO: 273762 - DNA, 25 bp, probe
tgctgtgaggagactgctgagacca

SEQ ID NO: 273763 - DNA, 25 bp, probe
tgctgtgtgtggtctcagaggctct

SEQ ID NO: 273764 - DNA, 25 bp, probe
tgcgtggtgaggacagcggccgcaa

SEQ ID NO: 273765 - DNA, 25 bp, probe
tgctgaggggtagcaggtccatctc

SEQ ID NO: 273766 - DNA, 25 bp, probe
tgctgaggggtagcaggtccatctc

SEQ ID NO: 273767 - DNA, 25 bp, probe
tgctcacgggctacaagttccagcc

SEQ ID NO: 273768 - DNA, 25 bp, probe
tgctgcactggtcccaagtagtagt

SEQ ID NO: 273769 - DNA, 25 bp, probe
tgctcactgcttcgtcggcaaaaat

SEQ ID NO: 273770 - DNA, 25 bp, probe
tgctctctatttagcggagaaatat

SEQ ID NO: 273771 - DNA, 25 bp, probe
tgctctgccttttgcttggatacat

SEQ ID NO: 273772 - DNA, 25 bp, probe
tgctggcacattttcttgcagaaca

SEQ ID NO: 273773 - DNA, 25 bp, probe
tgctggcacttattgcaatttaaca

SEQ ID NO: 273774 - DNA, 25 bp, probe
tgctggcacttaaggttcgctatcc

SEQ ID NO: 273775 - DNA, 25 bp, probe
tgctcgacctcgagttatccatgcc

SEQ ID NO: 273776 - DNA, 25 bp, probe
tgctcgacctcgagttatccatgcc

SEQ ID NO: 273777 - DNA, 25 bp, probe
tgctgaaccccatgatttacagcct

SEQ ID NO: 273778 - DNA, 25 bp, probe
tgctgagacccacaggtctaagagg

SEQ ID NO: 273779 - DNA, 25 bp, probe
tgctgaactccaagggctataccaa

SEQ ID NO: 273780 - DNA, 25 bp, probe
tctgaagcatcaaagccttagacca

SEQ ID NO: 273781 - DNA, 25 bp, probe
tgctgagaaaaacccaagaccgctc

SEQ ID NO: 273782 - DNA, 25 bp, probe
tgctgaaggaaccaacagtccacct

SEQ ID NO: 273783 - DNA, 25 bp, probe
tcgagaagcccgactatgactacct

SEQ ID NO: 273784 - DNA, 25 bp, probe
tgcgaaagtgccttctaggtgcttg

SEQ ID NO: 273785 - DNA, 25 bp, probe
tgcgaaagtgccttctaggtgcttg

SEQ ID NO: 273786 - DNA, 25 bp, probe
tgctgtcacagaccagcttcagggc

SEQ ID NO: 273787 - DNA, 25 bp, probe
tgctccagcaaggagttcaagcgcg

SEQ ID NO: 273788 - DNA, 25 bp, probe
tgctccaacggagttccagagtgtg

SEQ ID NO: 273789 - DNA, 25 bp, probe
tctgcagcacttcactaccaaatga

SEQ ID NO: 273790 - DNA, 25 bp, probe
tctgcagcacttcactaccaaatga

SEQ ID NO: 273791 - DNA, 25 bp, probe
tgcggcactatttctgaacaaagag

SEQ ID NO: 273792 - DNA, 25 bp, probe
tgcgtggtgtatgataacaacagca

SEQ ID NO: 273793 - DNA, 25 bp, probe
tgcggggacaaattccagcagctgc

SEQ ID NO: 273794 - DNA, 25 bp, probe
tgctgggtaccagatgaccactgac

SEQ ID NO: 273795 - DNA, 25 bp, probe
tgcgggatcagcaacgctaccacga

SEQ ID NO: 273796 - DNA, 25 bp, probe
tgcgtggatgtcaagctcatctccc

SEQ ID NO: 273797 - DNA, 25 bp, probe
tgctgttttcatagctttgctgccc

SEQ ID NO: 273798 - DNA, 25 bp, probe
tgctgttgctctgatgtttgctcag

SEQ ID NO: 273799 - DNA, 25 bp, probe
tgctcatgtgacagcagtttgctcc

SEQ ID NO: 273800 - DNA, 25 bp, probe
tgctgcaggatctgcgtgtgtctcc

SEQ ID NO: 273801 - DNA, 25 bp, probe
tgctgcaggatctgcgtgtgtctcc

SEQ ID NO: 273802 - DNA, 25 bp, probe
tgctctgaagcaagtgcgttcagct

SEQ ID NO: 273803 - DNA, 25 bp, probe
tgctctgaagcaagtgcgttcagct

SEQ ID NO: 273804 - DNA, 25 bp, probe
tgctcatgacgctctggttgagctc

SEQ ID NO: 273805 - DNA, 25 bp, probe
tgctcagagcgggggtgctggagcg

SEQ ID NO: 273806 - DNA, 25 bp, probe
tgctgctacgggcgtctggagaagc

SEQ ID NO: 273807 - DNA, 25 bp, probe
tgctggagccgggagtctgagcagc

SEQ ID NO: 273808 - DNA, 25 bp, probe
tgcgacagccgggacttcgtggctg

SEQ ID NO: 273809 - DNA, 25 bp, probe
tgcggagctacgttttgcagggctc

SEQ ID NO: 273810 - DNA, 25 bp, probe
tgctgggaagtgctaggcagggctg

SEQ ID NO: 273811 - DNA, 25 bp, probe
tgctggcctgggccttaagggctgg

SEQ ID NO: 273812 - DNA, 25 bp, probe
tgctgagcttcgccctggaagaagc

SEQ ID NO: 273813 - DNA, 25 bp, probe
tgctgagtctgtctgggagctggac

SEQ ID NO: 273814 - DNA, 25 bp, probe
tgccgtggtcgtgggagtgtacagg

SEQ ID NO: 273815 - DNA, 25 bp, probe
tgcctggtccagtggggaacaggtc

SEQ ID NO: 273816 - DNA, 25 bp, probe
tgccgccttaatggggggaactgcc

SEQ ID NO: 273817 - DNA, 25 bp, probe
tgcccatcgctttggaggtaaaacc

SEQ ID NO: 273818 - DNA, 25 bp, probe
tgctgcttctctgccgatggaaaaa

SEQ ID NO: 273819 - DNA, 25 bp, probe
tgctgctcccgtcgtagtaagaaga

SEQ ID NO: 273820 - DNA, 25 bp, probe
tgctccaagttggtcagctgaagaa

SEQ ID NO: 273821 - DNA, 25 bp, probe
tgctctttctctgccagtgacagac

SEQ ID NO: 273822 - DNA, 25 bp, probe
tgctctcttatcccaattcaagacc

SEQ ID NO: 273823 - DNA, 25 bp, probe
tgctctcttatcccaattcaagacc

SEQ ID NO: 273824 - DNA, 25 bp, probe
tgctctcattatctgcaatgaagaa

SEQ ID NO: 273825 - DNA, 25 bp, probe
tgctgctcattatctaacaaacata

SEQ ID NO: 273826 - DNA, 25 bp, probe
tgctgagcttcgtcaaagaattcaa

SEQ ID NO: 273827 - DNA, 25 bp, probe
tgctggatttgtccatcaacttcag

SEQ ID NO: 273828 - DNA, 25 bp, probe
tgctggtcattttctacaagatgag

SEQ ID NO: 273829 - DNA, 25 bp, probe
tgctgttctgtgtacataaagtcat

SEQ ID NO: 273830 - DNA, 25 bp, probe
tgctgtcactgtctcattaaatata

SEQ ID NO: 273831 - DNA, 25 bp, probe
tgctgcctctgtctatttcaatata

SEQ ID NO: 273832 - DNA, 25 bp, probe
tgctgcctctgtaaattcatgtatt

SEQ ID NO: 273833 - DNA, 25 bp, probe
tgctgcacatctatgacaaagtgat

SEQ ID NO: 273834 - DNA, 25 bp, probe
tgctgcaaccctgagaagttacttc

SEQ ID NO: 273835 - DNA, 25 bp, probe
tgctgacctcctcagaatgttgacc

SEQ ID NO: 273836 - DNA, 25 bp, probe
tgcgattcttctcagacatgtcttc

SEQ ID NO: 273837 - DNA, 25 bp, probe
tgctgttgtgttcaccatggctgtc

SEQ ID NO: 273838 - DNA, 25 bp, probe
tgctgttgtgttcaccatggctgtc

SEQ ID NO: 273839 - DNA, 25 bp, probe
tgcgttcgctgaaaggcatcggtgc

SEQ ID NO: 273840 - DNA, 25 bp, probe
tgctgacttggaaggtgccctgtgc

SEQ ID NO: 273841 - DNA, 25 bp, probe
tgctgacattgacgtagtcgttgtc

SEQ ID NO: 273842 - DNA, 25 bp, probe
tgctccttggcctagtcagatggat

SEQ ID NO: 273843 - DNA, 25 bp, probe
tgctccttggcctagtcagatggat

SEQ ID NO: 273844 - DNA, 25 bp, probe
tgctccgggcgcagtagggatgata

SEQ ID NO: 273845 - DNA, 25 bp, probe
tgctcctgaaggtgttggtatcaca

SEQ ID NO: 273846 - DNA, 25 bp, probe
tccccaaggccgtgtgtatgaacgg

SEQ ID NO: 273847 - DNA, 25 bp, probe
tcctaaattccctggtagatcacct

SEQ ID NO: 273848 - DNA, 25 bp, probe
tcctaaattccctggtagatcacct

SEQ ID NO: 273849 - DNA, 25 bp, probe
tccttaattaactgggatgatctca

SEQ ID NO: 273850 - DNA, 25 bp, probe
tgcgcttagattttaccggtctgta

SEQ ID NO: 273851 - DNA, 25 bp, probe
tccttcagacggttttggatcttac

SEQ ID NO: 273852 - DNA, 25 bp, probe
tccttcagacggttttggatcttac

SEQ ID NO: 273853 - DNA, 25 bp, probe
tccactacaggttttatgagacttc

SEQ ID NO: 273854 - DNA, 25 bp, probe
tccactacaggttttatgagacttc

SEQ ID NO: 273855 - DNA, 25 bp, probe
tgccattaagaagtcccataacccc

SEQ ID NO: 273856 - DNA, 25 bp, probe
tgcctcaagaaagccataaacctgg

SEQ ID NO: 273857 - DNA, 25 bp, probe
tgctccacataagatccaaaacctc

SEQ ID NO: 273858 - DNA, 25 bp, probe
tgcctctgaactgagccaaaccttc

SEQ ID NO: 273859 - DNA, 25 bp, probe
tgcctgtgggttcggaaagcccatc

SEQ ID NO: 273860 - DNA, 25 bp, probe
tgccgtgaagtcaggacttgccgtc

SEQ ID NO: 273861 - DNA, 25 bp, probe
tgctgggaagcccggactgaccaaa

SEQ ID NO: 273862 - DNA, 25 bp, probe
tgcgggagctccaggaagccctgga

SEQ ID NO: 273863 - DNA, 25 bp, probe
tgctccggcaccagagaaccgtgga

SEQ ID NO: 273864 - DNA, 25 bp, probe
tgctcctccaccatggaagtcagtt

SEQ ID NO: 273865 - DNA, 25 bp, probe
tgctccttatcctggacatgaatgt

SEQ ID NO: 273866 - DNA, 25 bp, probe
tgctccatttccttctaaacagtag

SEQ ID NO: 273867 - DNA, 25 bp, probe
tgctgctgttaccagtccaaaagtc

SEQ ID NO: 273868 - DNA, 25 bp, probe
tgctgctgttctgtgtacataaagt

SEQ ID NO: 273869 - DNA, 25 bp, probe
tgctgctatttccctacataatgtc

SEQ ID NO: 273870 - DNA, 25 bp, probe
tgctgccacttccggaagatggtcc

SEQ ID NO: 273871 - DNA, 25 bp, probe
tgctgctgaccctggtagaggtcat

SEQ ID NO: 273872 - DNA, 25 bp, probe
tgctctggccctgggagctgaattc

SEQ ID NO: 273873 - DNA, 25 bp, probe
tgccttggcctcccaagtatgtggg

SEQ ID NO: 273874 - DNA, 25 bp, probe
tgccgtagcctctcaaagtgctgga

SEQ ID NO: 273875 - DNA, 25 bp, probe
tgccctggcccataccaggcagggc

SEQ ID NO: 273876 - DNA, 25 bp, probe
tgcccgccagtatgaccagggcgtc

SEQ ID NO: 273877 - DNA, 25 bp, probe
tgctctggttttcgtccaggacgtc

SEQ ID NO: 273878 - DNA, 25 bp, probe
tgctctggttttcgtccaggacgtc

SEQ ID NO: 273879 - DNA, 25 bp, probe
tgccttattcttcacaaagcatccc

SEQ ID NO: 273880 - DNA, 25 bp, probe
tcctaaatatgtgaaaagtcgccca

SEQ ID NO: 273881 - DNA, 25 bp, probe
tcccaaaggtcgacaagtggtcccg

SEQ ID NO: 273882 - DNA, 25 bp, probe
tccaaaagcctgcatcggggattcc

SEQ ID NO: 273883 - DNA, 25 bp, probe
tccaaccaggtgccacggagtgtag

SEQ ID NO: 273884 - DNA, 25 bp, probe
tgctgcgctgaacagagacttccgc

SEQ ID NO: 273885 - DNA, 25 bp, probe
tgctgggcactgaggtttcagcgcc

SEQ ID NO: 273886 - DNA, 25 bp, probe
tgctggcggtgcacatgtttatcga

SEQ ID NO: 273887 - DNA, 25 bp, probe
tgctggcggtgcacatgtttatcga

SEQ ID NO: 273888 - DNA, 25 bp, probe
tgctggtggttgtagtctttgctgc

SEQ ID NO: 273889 - DNA, 25 bp, probe
tgctctgggcggaagagctttgctg

SEQ ID NO: 273890 - DNA, 25 bp, probe
tgctctgagggaaacagtgactgct

SEQ ID NO: 273891 - DNA, 25 bp, probe
tgctctgagtcagaagctggagctg

SEQ ID NO: 273892 - DNA, 25 bp, probe
tgctcggacagcaaacaacactttg

SEQ ID NO: 273893 - DNA, 25 bp, probe
tgctgtggacaggcaccaatttctt

SEQ ID NO: 273894 - DNA, 25 bp, probe
tgctggcagttcggctagatttctg

SEQ ID NO: 273895 - DNA, 25 bp, probe
tgctccagtggggccatgattggtt

SEQ ID NO: 273896 - DNA, 25 bp, probe
tgctccatctgaagcggttctcaga

SEQ ID NO: 273897 - DNA, 25 bp, probe
tgctgcctctattatggcacttcaa

SEQ ID NO: 273898 - DNA, 25 bp, probe
tgctcctttagtgcactgtggaagc

SEQ ID NO: 273899 - DNA, 25 bp, probe
tgctcctttagtgcactgtggaagc

SEQ ID NO: 273900 - DNA, 25 bp, probe
tccacgtccattgacttgtggtcag

SEQ ID NO: 273901 - DNA, 25 bp, probe
tccagaccctggtggatgtgttcac

SEQ ID NO: 273902 - DNA, 25 bp, probe
tccagtttttaacgatggttccatc

SEQ ID NO: 273903 - DNA, 25 bp, probe
tgccgtttttcatagttttcaccac

SEQ ID NO: 273904 - DNA, 25 bp, probe
tgccgtttttcatagttttcaccac

SEQ ID NO: 273905 - DNA, 25 bp, probe
tgcccttctcgtaaagttgttcaat

SEQ ID NO: 273906 - DNA, 25 bp, probe
tgctgtttgtcgtgaaaagcttaat

SEQ ID NO: 273907 - DNA, 25 bp, probe
tgctgttaccagtccaaaagtctga

SEQ ID NO: 273908 - DNA, 25 bp, probe
tgctgtgtcccagaggaaagtgcgt

SEQ ID NO: 273909 - DNA, 25 bp, probe
tgctgtttcctgttgggcaatgctc

SEQ ID NO: 273910 - DNA, 25 bp, probe
tgctgcttctacacatgtggtactc

SEQ ID NO: 273911 - DNA, 25 bp, probe
tgctgctctcggagcagggtgatgt

SEQ ID NO: 273912 - DNA, 25 bp, probe
tgctgttcggtcgagtgccatttga

SEQ ID NO: 273913 - DNA, 25 bp, probe
tgctgttcggtcgagtgccatttga

SEQ ID NO: 273914 - DNA, 25 bp, probe
tctgttctgcaggtgagaggattta

SEQ ID NO: 273915 - DNA, 25 bp, probe
tctgttctgcaggtgagaggattta

SEQ ID NO: 273916 - DNA, 25 bp, probe
tgctgcttgtgatatatggagtctt

SEQ ID NO: 273917 - DNA, 25 bp, probe
tgctgctaagtacatgctggattgt

SEQ ID NO: 273918 - DNA, 25 bp, probe
tgcgccaagttgctgctggaagcag

SEQ ID NO: 273919 - DNA, 25 bp, probe
tgcgccaagttgctgctggaagcag

SEQ ID NO: 273920 - DNA, 25 bp, probe
tgcgtattgcctcagtggaggcgct

SEQ ID NO: 273921 - DNA, 25 bp, probe
tgctgctggtttccaggggccagcg

SEQ ID NO: 273922 - DNA, 25 bp, probe
tgcgctggcttttgacagaggcagt

SEQ ID NO: 273923 - DNA, 25 bp, probe
tgcctgaattacgagcagaaagatc

SEQ ID NO: 273924 - DNA, 25 bp, probe
tgcccgatgcaatgagaaaaacatt

SEQ ID NO: 273925 - DNA, 25 bp, probe
tgctccaaaacgaaacaagagattt

SEQ ID NO: 273926 - DNA, 25 bp, probe
tgccccaaacaaacctagctaactg

SEQ ID NO: 273927 - DNA, 25 bp, probe
tgcccgcaaagctcgcgctacaaaa

SEQ ID NO: 273928 - DNA, 25 bp, probe
tgcgtcccacctgacagtacataaa

SEQ ID NO: 273929 - DNA, 25 bp, probe
tgctgatccaattctgtactgtttt

SEQ ID NO: 273930 - DNA, 25 bp, probe
tgctgacctatacctccggtattgt

SEQ ID NO: 273931 - DNA, 25 bp, probe
tgcgcttaaaacagcggaaatgatt

SEQ ID NO: 273932 - DNA, 25 bp, probe
tgcctacaaaacacagtgaacgact

SEQ ID NO: 273933 - DNA, 25 bp, probe
tccggcaggaccgagccgaacgacg

SEQ ID NO: 273934 - DNA, 25 bp, probe
tcccgagtagccgggactacgggcg

SEQ ID NO: 273935 - DNA, 25 bp, probe
tcccgtgaccccagaaaccaggtca

SEQ ID NO: 273936 - DNA, 25 bp, probe
tctccgcgttcatcaagaacccggt

SEQ ID NO: 273937 - DNA, 25 bp, probe
tgctgggctgcttaagaaggacccc

SEQ ID NO: 273938 - DNA, 25 bp, probe
tgctgggctgcttaagaaggacccc

SEQ ID NO: 273939 - DNA, 25 bp, probe
tgcgggcgctctagaggataacaag

SEQ ID NO: 273940 - DNA, 25 bp, probe
tgcccaccgtagggaagcagcacag

SEQ ID NO: 273941 - DNA, 25 bp, probe
tgctccaaggcttttgagacacaag

SEQ ID NO: 273942 - DNA, 25 bp, probe
tcggtcattgctgttgaaaaagatt

SEQ ID NO: 273943 - DNA, 25 bp, probe
tctgtccattgcttttaattaaaat

SEQ ID NO: 273944 - DNA, 25 bp, probe
tctgtctcttggctattttaaccta

SEQ ID NO: 273945 - DNA, 25 bp, probe
tgctgtctcttggcattgcttatta

SEQ ID NO: 273946 - DNA, 25 bp, probe
tgctgttctctgtcactgttcccgg

SEQ ID NO: 273947 - DNA, 25 bp, probe
tgctgttctctgtcactgttcccgg

SEQ ID NO: 273948 - DNA, 25 bp, probe
tgcgttatctcagcttcttcaggcg

SEQ ID NO: 273949 - DNA, 25 bp, probe
tgcgttcccagtcatttcagtgaga

SEQ ID NO: 273950 - DNA, 25 bp, probe
tgcgttcccagtcatttcagtgaga

SEQ ID NO: 273951 - DNA, 25 bp, probe
tgcgttacctgtcactattgtgcct

SEQ ID NO: 273952 - DNA, 25 bp, probe
tgcgttacctgtcactattgtgcct

SEQ ID NO: 273953 - DNA, 25 bp, probe
tgctgtaactctccaaggactctca

SEQ ID NO: 273954 - DNA, 25 bp, probe
tgctgtgtacttacagcccacatcc

SEQ ID NO: 273955 - DNA, 25 bp, probe
tgctgtgtacttacagcccacatcc

SEQ ID NO: 273956 - DNA, 25 bp, probe
tgctgcagtactttacaaacttcta

SEQ ID NO: 273957 - DNA, 25 bp, probe
tgctggctacaactaccaagctttt

SEQ ID NO: 273958 - DNA, 25 bp, probe
tgctgccaagaaatatcgtgacttt

SEQ ID NO: 273959 - DNA, 25 bp, probe
tgctgccaagaaatatcgtgacttt

SEQ ID NO: 273960 - DNA, 25 bp, probe
tgcccaagaacatcacgtgcatttg

SEQ ID NO: 273961 - DNA, 25 bp, probe
tccaatacgacagccgaactctggg

SEQ ID NO: 273962 - DNA, 25 bp, probe
tccaaagcccccatggacgcatgga

SEQ ID NO: 273963 - DNA, 25 bp, probe
tgcgacaaccacgcgtcgagtgagc

SEQ ID NO: 273964 - DNA, 25 bp, probe
tgctgaccccgttggtggaggacgg

SEQ ID NO: 273965 - DNA, 25 bp, probe
tgctggacttcgtcgttggaggagg

SEQ ID NO: 273966 - DNA, 25 bp, probe
tgctggaatttgtggctgatgaagg

SEQ ID NO: 273967 - DNA, 25 bp, probe
tgctgcccgtcatgggctggaactg

SEQ ID NO: 273968 - DNA, 25 bp, probe
tgctgcccagcgctggggtgaggct

SEQ ID NO: 273969 - DNA, 25 bp, probe
tgctgcccactgcttggagaagtcc

SEQ ID NO: 273970 - DNA, 25 bp, probe
tgctgccgcactggaaggagacgca

SEQ ID NO: 273971 - DNA, 25 bp, probe
tgctgcaagccgtgcagcgcaacgg

SEQ ID NO: 273972 - DNA, 25 bp, probe
tgctggagtcggcgcgcaaagcgaa

SEQ ID NO: 273973 - DNA, 25 bp, probe
tgctgcggtcggagagcgaggagaa

SEQ ID NO: 273974 - DNA, 25 bp, probe
tgctgctgtgctacgaggacgaggg

SEQ ID NO: 273975 - DNA, 25 bp, probe
tgctgatgataaaaggaagatgccc

SEQ ID NO: 273976 - DNA, 25 bp, probe
tgctgctcgagaaaggaaagccact

SEQ ID NO: 273977 - DNA, 25 bp, probe
tgctgcctggcagagtgacaaaggc

SEQ ID NO: 273978 - DNA, 25 bp, probe
tgctgttggcagtaggaatcattgc

SEQ ID NO: 273979 - DNA, 25 bp, probe
tgctgaagtgagtagtgtgatcctg

SEQ ID NO: 273980 - DNA, 25 bp, probe
tgctgcacgaggttttcacctatgg

SEQ ID NO: 273981 - DNA, 25 bp, probe
tgctgagcgaagctataggctcttg

SEQ ID NO: 273982 - DNA, 25 bp, probe
tgctggccaagctttatagccctca

SEQ ID NO: 273983 - DNA, 25 bp, probe
tgctggaaactttctcagtacccct

SEQ ID NO: 273984 - DNA, 25 bp, probe
tgctggaagcctttgtctatgaccc

SEQ ID NO: 273985 - DNA, 25 bp, probe
tgctggcacaccagtggcaaggccc

SEQ ID NO: 273986 - DNA, 25 bp, probe
tgctggctcaactgggacatgacca

SEQ ID NO: 273987 - DNA, 25 bp, probe
tgctggccaagacgtgggtgcgcaa

SEQ ID NO: 273988 - DNA, 25 bp, probe
tgctggccttgaggtggggaagccg

SEQ ID NO: 273989 - DNA, 25 bp, probe
tgctgactctatgagatggggaaca

SEQ ID NO: 273990 - DNA, 25 bp, probe
tgctgacatctatgcaatgggctta

SEQ ID NO: 273991 - DNA, 25 bp, probe
tgctgacatctatgcaatgggctta

SEQ ID NO: 273992 - DNA, 25 bp, probe
tgcgagcagctaatgttctggtctc

SEQ ID NO: 273993 - DNA, 25 bp, probe
tgcggcagcatatgcagcccgtgct

SEQ ID NO: 273994 - DNA, 25 bp, probe
tgctgtcagcaatatcctcattgct

SEQ ID NO: 273995 - DNA, 25 bp, probe
tgctgatcacaatactgtcctgcca

SEQ ID NO: 273996 - DNA, 25 bp, probe
tgctgctcaacaagacctcttgaca

SEQ ID NO: 273997 - DNA, 25 bp, probe
tgctgctcatagccatggcctttga

SEQ ID NO: 273998 - DNA, 25 bp, probe
tgcgctcagtgccatgcgttcgctg

SEQ ID NO: 273999 - DNA, 25 bp, probe
tgctgccatctggatcgttgtgggg

SEQ ID NO: 274000 - DNA, 25 bp, probe
tgctgccctggctttgagctggggc

SEQ ID NO: 274001 - DNA, 25 bp, probe
tgctgtccatggtagtcagtatggc

SEQ ID NO: 274002 - DNA, 25 bp, probe
tgcgatgccattgactggtgctgcc

SEQ ID NO: 274003 - DNA, 25 bp, probe
tgctgaggagtatctggtaccccag

SEQ ID NO: 274004 - DNA, 25 bp, probe
tgctgggggatgtcaggtgccaccc

SEQ ID NO: 274005 - DNA, 25 bp, probe
tgctgtgtggcggagggtgcgagct

SEQ ID NO: 274006 - DNA, 25 bp, probe
tgctgtcattctgagcagcgtcaac

SEQ ID NO: 274007 - DNA, 25 bp, probe
tgcgtgcagtctggcagccttaagc

SEQ ID NO: 274008 - DNA, 25 bp, probe
tgctggcagcgggagcccagcaacg

SEQ ID NO: 274009 - DNA, 25 bp, probe
tgcggaggggacacagcagaggccc

SEQ ID NO: 274010 - DNA, 25 bp, probe
tgctggacgggacggcagacgatgc

SEQ ID NO: 274011 - DNA, 25 bp, probe
tgctggcgcgggatgaggacgggcc

SEQ ID NO: 274012 - DNA, 25 bp, probe
tgctggcgcgggagcaatagcgagg

SEQ ID NO: 274013 - DNA, 25 bp, probe
tgcgatgaggggactttagaagagg

SEQ ID NO: 274014 - DNA, 25 bp, probe
tgcggagaggcgaaactgagtcaga

SEQ ID NO: 274015 - DNA, 25 bp, probe
tgcggctggaggatacggtcgctgc

SEQ ID NO: 274016 - DNA, 25 bp, probe
tgcgtgtggcagcgttggtggccag

SEQ ID NO: 274017 - DNA, 25 bp, probe
tgcggcaggagggtgtggtggacat

SEQ ID NO: 274018 - DNA, 25 bp, probe
tgctgtagatgtgcgtgcagtctgg

SEQ ID NO: 274019 - DNA, 25 bp, probe
tgctgcaaaatggctctgcaccagc

SEQ ID NO: 274020 - DNA, 25 bp, probe
tgctgcagaactgctggagcgagct

SEQ ID NO: 274021 - DNA, 25 bp, probe
tgctgggacatggctggagctggca

SEQ ID NO: 274022 - DNA, 25 bp, probe
tgctgggacaccagttgcgcagtgc

SEQ ID NO: 274023 - DNA, 25 bp, probe
tgctgggcaccctactatgtgctac

SEQ ID NO: 274024 - DNA, 25 bp, probe
tgctgggcaccctactatgtgctac

SEQ ID NO: 274025 - DNA, 25 bp, probe
tgctgacgactcctcagaaggctca

SEQ ID NO: 274026 - DNA, 25 bp, probe
tgctgcacccatctgcggatggtac

SEQ ID NO: 274027 - DNA, 25 bp, probe
tgctgcacccatctgcggatggtac

SEQ ID NO: 274028 - DNA, 25 bp, probe
tgcgatccacagacgaggaggatga

SEQ ID NO: 274029 - DNA, 25 bp, probe
tgcgatcccgggaagaggagctgac

SEQ ID NO: 274030 - DNA, 25 bp, probe
tgcggcccagggaatgagatggagc

SEQ ID NO: 274031 - DNA, 25 bp, probe
tgcgcgccctggagcaggagaagct

SEQ ID NO: 274032 - DNA, 25 bp, probe
tgctgctgtccatcccatggaaaca

SEQ ID NO: 274033 - DNA, 25 bp, probe
tgctggacacccgcatgtgtaacaa

SEQ ID NO: 274034 - DNA, 25 bp, probe
tgctgaaacatccacacattgtaga

SEQ ID NO: 274035 - DNA, 25 bp, probe
tgctggatactgccgatctactggc

SEQ ID NO: 274036 - DNA, 25 bp, probe
tgcgacatgacggtgatgctgagct

SEQ ID NO: 274037 - DNA, 25 bp, probe
tgcccagattgcgctacagctaggc

SEQ ID NO: 274038 - DNA, 25 bp, probe
tgcccgtgtgcagaaaccggatatg

SEQ ID NO: 274039 - DNA, 25 bp, probe
tgcccttgcatggaaaactgtttat

SEQ ID NO: 274040 - DNA, 25 bp, probe
tgcccgtcatcgtgaacaatttcgg

SEQ ID NO: 274041 - DNA, 25 bp, probe
tgcccgtcatcgtgaacaatttcgg

SEQ ID NO: 274042 - DNA, 25 bp, probe
tgcccgtgcagtgggaccagattcc

SEQ ID NO: 274043 - DNA, 25 bp, probe
tgctgctgctggggggatcacagac

SEQ ID NO: 274044 - DNA, 25 bp, probe
tgctgctgctggggggatcacagac

SEQ ID NO: 274045 - DNA, 25 bp, probe
tgctgctgctgtgaggagtgcggcg

SEQ ID NO: 274046 - DNA, 25 bp, probe
tgctgtggtgcatggcagcggaggc

SEQ ID NO: 274047 - DNA, 25 bp, probe
tgctgagagtgagctgcctgggtgc

SEQ ID NO: 274048 - DNA, 25 bp, probe
tgcgcaagaagcggcagatggcggc

SEQ ID NO: 274049 - DNA, 25 bp, probe
tgcgcattgagatccatggggtgcc

SEQ ID NO: 274050 - DNA, 25 bp, probe
tgctgctgaacaccctggaagggaa

SEQ ID NO: 274051 - DNA, 25 bp, probe
tgctgcagaaaagctgtttgggaat

SEQ ID NO: 274052 - DNA, 25 bp, probe
tgcgaaattattggttggtgtgaag

SEQ ID NO: 274053 - DNA, 25 bp, probe
tgctggagactttggatcggttggt

SEQ ID NO: 274054 - DNA, 25 bp, probe
tgctgggatctttgagcttgtggag

SEQ ID NO: 274055 - DNA, 25 bp, probe
tgctggcgtctaagtgtttgggaag

SEQ ID NO: 274056 - DNA, 25 bp, probe
tgctgagccttactgggttgaaaag

SEQ ID NO: 274057 - DNA, 25 bp, probe
tgctggcctgttacctggtgaagga

SEQ ID NO: 274058 - DNA, 25 bp, probe
tgctggcgcttctctcgtcggcgga

SEQ ID NO: 274059 - DNA, 25 bp, probe
tgctggtgcttcacacctcaggaaa

SEQ ID NO: 274060 - DNA, 25 bp, probe
tgctgttttctacccttggaaagaa

SEQ ID NO: 274061 - DNA, 25 bp, probe
tgctgttttctacccttggaaagaa

SEQ ID NO: 274062 - DNA, 25 bp, probe
tgcgtttctggtcccttgggagagg

SEQ ID NO: 274063 - DNA, 25 bp, probe
tcgttttcagttgtttgtggacctc

SEQ ID NO: 274064 - DNA, 25 bp, probe
tcgttttcagttgtttgtggacctc

SEQ ID NO: 274065 - DNA, 25 bp, probe
tgcgttgtttgtgtgttctatggga

SEQ ID NO: 274066 - DNA, 25 bp, probe
tgccttgtccagatatgtccttagg

SEQ ID NO: 274067 - DNA, 25 bp, probe
tgccctgcttcatgatgaaccctac

SEQ ID NO: 274068 - DNA, 25 bp, probe
tgccctgcttcatgatgaaccctac

SEQ ID NO: 274069 - DNA, 25 bp, probe
tgccctcttaaaccagcagtttctc

SEQ ID NO: 274070 - DNA, 25 bp, probe
tgcggtttccaaggtgcacattttc

SEQ ID NO: 274071 - DNA, 25 bp, probe
tgcggtgcattggagacgtccgttg

SEQ ID NO: 274072 - DNA, 25 bp, probe
tgctgtgtcttgggaacctgtgatt

SEQ ID NO: 274073 - DNA, 25 bp, probe
tgctgcagtcctgcagtcacctata

SEQ ID NO: 274074 - DNA, 25 bp, probe
tgctgcacgtatgcagtatcctatc

SEQ ID NO: 274075 - DNA, 25 bp, probe
tgctgcagctgaaatcggattcgtc

SEQ ID NO: 274076 - DNA, 25 bp, probe
tgctgtctgagcaatcgtggtgcct

SEQ ID NO: 274077 - DNA, 25 bp, probe
tgcggcatagcaacctggtgcagct

SEQ ID NO: 274078 - DNA, 25 bp, probe
tgctgctcatcgactacgggcagct

SEQ ID NO: 274079 - DNA, 25 bp, probe
tgctgcttcgttaggctggagggca

SEQ ID NO: 274080 - DNA, 25 bp, probe
tgctgcttgggcttggagacaagga

SEQ ID NO: 274081 - DNA, 25 bp, probe
tgccctgggttgcagactcagtagc

SEQ ID NO: 274082 - DNA, 25 bp, probe
tgccctggagggccaactcaagaag

SEQ ID NO: 274083 - DNA, 25 bp, probe
tgccctgagggtgctcaatcaagca

SEQ ID NO: 274084 - DNA, 25 bp, probe
tgcctgtcagtaaccctgacagagg

SEQ ID NO: 274085 - DNA, 25 bp, probe
tgcccaagatagcccgcgaaggcga

SEQ ID NO: 274086 - DNA, 25 bp, probe
tgcccactgacaccatacgtaagga

SEQ ID NO: 274087 - DNA, 25 bp, probe
tgccgacgacagctactacactgta

SEQ ID NO: 274088 - DNA, 25 bp, probe
tgcccacgactatagccagcagtgt

SEQ ID NO: 274089 - DNA, 25 bp, probe
tgctgcaccaactattactccaggt

SEQ ID NO: 274090 - DNA, 25 bp, probe
tgctgaccacagcctgatattccag

SEQ ID NO: 274091 - DNA, 25 bp, probe
tgccatcaccagcttatccagtgac

SEQ ID NO: 274092 - DNA, 25 bp, probe
tgccatcaccagcttatccagtgac

SEQ ID NO: 274093 - DNA, 25 bp, probe
tccacattgtgccagctatcctgag

SEQ ID NO: 274094 - DNA, 25 bp, probe
tccacattgtgccagctatcctgag

SEQ ID NO: 274095 - DNA, 25 bp, probe
tgcgcaactctgagttcctggtgca

SEQ ID NO: 274096 - DNA, 25 bp, probe
tgcccatctctttggacagtggcca

SEQ ID NO: 274097 - DNA, 25 bp, probe
tgcccattactgtgagggacccttg

SEQ ID NO: 274098 - DNA, 25 bp, probe
tgccacaaggtgggggaggccctgg

SEQ ID NO: 274099 - DNA, 25 bp, probe
tgcccccagaaaggggctgccctgg

SEQ ID NO: 274100 - DNA, 25 bp, probe
tgcctcccacaatgtggaggccacc

SEQ ID NO: 274101 - DNA, 25 bp, probe
tgccctcaagcgacgctggtgggca

SEQ ID NO: 274102 - DNA, 25 bp, probe
tgcgctaccacgagggtgggcgctt

SEQ ID NO: 274103 - DNA, 25 bp, probe
tgcccctgcacgtggggctgacagt

SEQ ID NO: 274104 - DNA, 25 bp, probe
tgcctccgaaagagggccaggtcct

SEQ ID NO: 274105 - DNA, 25 bp, probe
tgcccccaagagtgtagggggcctt

SEQ ID NO: 274106 - DNA, 25 bp, probe
tgctgtccccaacagctggggtggc

SEQ ID NO: 274107 - DNA, 25 bp, probe
tgctgtccccaacagctggggtggc

SEQ ID NO: 274108 - DNA, 25 bp, probe
tgctgaccagcttctgggggggtga

SEQ ID NO: 274109 - DNA, 25 bp, probe
tgctggggttcaggggtgaggtgaa

SEQ ID NO: 274110 - DNA, 25 bp, probe
tgctggtggttctggacatggagga

SEQ ID NO: 274111 - DNA, 25 bp, probe
tgctggaggtgtcactgcagatgga

SEQ ID NO: 274112 - DNA, 25 bp, probe
tgctgttgggtggctggcttgatga

SEQ ID NO: 274113 - DNA, 25 bp, probe
tgctgttgggtggctggcttgatga

SEQ ID NO: 274114 - DNA, 25 bp, probe
tgctgggcgtgtgtgacactgatga

SEQ ID NO: 274115 - DNA, 25 bp, probe
tgctgggcgtgtgtgacactgatga

SEQ ID NO: 274116 - DNA, 25 bp, probe
tgctggcaggggacatgacctggct

SEQ ID NO: 274117 - DNA, 25 bp, probe
tgctggcagcgccatggagacggta

SEQ ID NO: 274118 - DNA, 25 bp, probe
tgctgacatgctcctggtgagcgcg

SEQ ID NO: 274119 - DNA, 25 bp, probe
tgctgttgctcatggcgatgcactc

SEQ ID NO: 274120 - DNA, 25 bp, probe
tgctggctctcattggtatcatgtt

SEQ ID NO: 274121 - DNA, 25 bp, probe
tgctggtcatcagcgtgtttaccgg

SEQ ID NO: 274122 - DNA, 25 bp, probe
tgctggtcatcagcgtgtttaccgg

SEQ ID NO: 274123 - DNA, 25 bp, probe
tgcgcttcatccaggaggtgcacgc

SEQ ID NO: 274124 - DNA, 25 bp, probe
tgcggttctcagatggtggcactca

SEQ ID NO: 274125 - DNA, 25 bp, probe
tgctggttctcgttgagtgggccaa

SEQ ID NO: 274126 - DNA, 25 bp, probe
tgctgtgtgcctggctaagtgggtt

SEQ ID NO: 274127 - DNA, 25 bp, probe
tgctggtccactgcaagatgggcgt

SEQ ID NO: 274128 - DNA, 25 bp, probe
tgctggaagactcactgacggagct

SEQ ID NO: 274129 - DNA, 25 bp, probe
tgctggacaagttcattcacgtggc

SEQ ID NO: 274130 - DNA, 25 bp, probe
tgctggcagaaggacccaggtgagc

SEQ ID NO: 274131 - DNA, 25 bp, probe
tgctggcacgaggcactaagtctca

SEQ ID NO: 274132 - DNA, 25 bp, probe
tgctggactgcaggcacaaagaccc

SEQ ID NO: 274133 - DNA, 25 bp, probe
tgctgggccggatcaagagcctgca

SEQ ID NO: 274134 - DNA, 25 bp, probe
tgctgggccggatcaagagcctgca

SEQ ID NO: 274135 - DNA, 25 bp, probe
tgctgaccccagtgaagacaccaga

SEQ ID NO: 274136 - DNA, 25 bp, probe
tgcgcatccccgtgggatcaagaga

SEQ ID NO: 274137 - DNA, 25 bp, probe
tgcgatgtgtccaatcggagacaaa

SEQ ID NO: 274138 - DNA, 25 bp, probe
tgcgattacgcttcagagataccaa

SEQ ID NO: 274139 - DNA, 25 bp, probe
tgctgtctactccaagaaaccaacg

SEQ ID NO: 274140 - DNA, 25 bp, probe
tgctgtgtgactcaaaccaaatcac

SEQ ID NO: 274141 - DNA, 25 bp, probe
tgctggtgacttctgaccataagct

SEQ ID NO: 274142 - DNA, 25 bp, probe
tgctggtgacttctgaccataagct

SEQ ID NO: 274143 - DNA, 25 bp, probe
tgctggcgtcttcatgagctccaga

SEQ ID NO: 274144 - DNA, 25 bp, probe
tgctggcgtcttcatgagctccaga

SEQ ID NO: 274145 - DNA, 25 bp, probe
tgctggcgtcttcatgagctccaga

SEQ ID NO: 274146 - DNA, 25 bp, probe
tgctggcgtcttcatgagctccaga

SEQ ID NO: 274147 - DNA, 25 bp, probe
tgctggctttcttttctctatgaaa

SEQ ID NO: 274148 - DNA, 25 bp, probe
tgcgagtttttatttttaataactg

SEQ ID NO: 274149 - DNA, 25 bp, probe
tgcgagtttttatttttaataactg

SEQ ID NO: 274150 - DNA, 25 bp, probe
tcaggcttggttcattttaatgaaa

SEQ ID NO: 274151 - DNA, 25 bp, probe
tgccacacgggtcattttaaaaggt

SEQ ID NO: 274152 - DNA, 25 bp, probe
tgcctcccggacgtttttcaggagg

SEQ ID NO: 274153 - DNA, 25 bp, probe
tgccgtttgtggggttttcgtacag

SEQ ID NO: 274154 - DNA, 25 bp, probe
tgccctcccttatgttgttggaaag

SEQ ID NO: 274155 - DNA, 25 bp, probe
tgcccttgtcattgaggttagggac

SEQ ID NO: 274156 - DNA, 25 bp, probe
tgcgttgtggaattgggaagggcac

SEQ ID NO: 274157 - DNA, 25 bp, probe
tgctgatgttagtactgggaagagg

SEQ ID NO: 274158 - DNA, 25 bp, probe
tgcgattttggcagtgcaaagcagt

SEQ ID NO: 274159 - DNA, 25 bp, probe
tgctgttcgaggatgtgtacgagct

SEQ ID NO: 274160 - DNA, 25 bp, probe
tgctggatctgctgtttgaagcgca

SEQ ID NO: 274161 - DNA, 25 bp, probe
tgctggcactgcctgtgttgaggca

SEQ ID NO: 274162 - DNA, 25 bp, probe
tgctgtgattgccgtccgaaatggc

SEQ ID NO: 274163 - DNA, 25 bp, probe
tgcgtgcagtggccccaaagatggc

SEQ ID NO: 274164 - DNA, 25 bp, probe
tgcggcgcatgcggcagcagagaaa

SEQ ID NO: 274165 - DNA, 25 bp, probe
tgcggcgcatgcggcagcagagaaa

SEQ ID NO: 274166 - DNA, 25 bp, probe
tgcggcgcatgcggcagcagagaaa

SEQ ID NO: 274167 - DNA, 25 bp, probe
tgcgacagcagcctgactgacaagg

SEQ ID NO: 274168 - DNA, 25 bp, probe
tgctgtgtggctcgatatgatcaac

SEQ ID NO: 274169 - DNA, 25 bp, probe
tgctgtgtgtgacatagacaccagg

SEQ ID NO: 274170 - DNA, 25 bp, probe
tgctggctgggcgagatgagcaccg

SEQ ID NO: 274171 - DNA, 25 bp, probe
tgctggctggatggtgagtcacttg

SEQ ID NO: 274172 - DNA, 25 bp, probe
tgctggggatggtgccagctgtgcc

SEQ ID NO: 274173 - DNA, 25 bp, probe
tgctggaggaacttgctgctgtgcc

SEQ ID NO: 274174 - DNA, 25 bp, probe
tgctggtgaacgtgctgtgtgctgt

SEQ ID NO: 274175 - DNA, 25 bp, probe
tgcgtatgaaagtgtgtgtctgctg

SEQ ID NO: 274176 - DNA, 25 bp, probe
tgcccagtggagtgttcagtctgga

SEQ ID NO: 274177 - DNA, 25 bp, probe
tgccggtgatactggtagttggtgt

SEQ ID NO: 274178 - DNA, 25 bp, probe
tccaggtgaagagtcgaaaatttta

SEQ ID NO: 274179 - DNA, 25 bp, probe
tccacgcctgggagaaaatttttag

SEQ ID NO: 274180 - DNA, 25 bp, probe
tgcccaggtgggtgaagacagtttt

SEQ ID NO: 274181 - DNA, 25 bp, probe
tgcccaggtgggtgaagacagtttt

SEQ ID NO: 274182 - DNA, 25 bp, probe
tgccccactgggttgaagcagatgt

SEQ ID NO: 274183 - DNA, 25 bp, probe
tgccgccagtgatgacggaggagta

SEQ ID NO: 274184 - DNA, 25 bp, probe
tgccgcactggaggacagttaagtt

SEQ ID NO: 274185 - DNA, 25 bp, probe
tgcccatctggccgccattgaaaga

SEQ ID NO: 274186 - DNA, 25 bp, probe
tgcccatctagcactttggaaatca

SEQ ID NO: 274187 - DNA, 25 bp, probe
tgcctgtcacgtctgttgggcaaac

SEQ ID NO: 274188 - DNA, 25 bp, probe
tgcctctccagtttctgaggccaga

SEQ ID NO: 274189 - DNA, 25 bp, probe
tgcccgccaatactctcataaagca

SEQ ID NO: 274190 - DNA, 25 bp, probe
tgcgcacgcagagtacctgcacaag

SEQ ID NO: 274191 - DNA, 25 bp, probe
tgcgagtgcaaggacctcatctacc

SEQ ID NO: 274192 - DNA, 25 bp, probe
tgcgcagatagagacaatcttaccc

SEQ ID NO: 274193 - DNA, 25 bp, probe
tgcgctcaataaacgtgtttctcct

SEQ ID NO: 274194 - DNA, 25 bp, probe
tgcgtcaatcagagcgtcctgtgca

SEQ ID NO: 274195 - DNA, 25 bp, probe
tgcgctgaacagagacttccgcacc

SEQ ID NO: 274196 - DNA, 25 bp, probe
tgctgtgcaaggaggcttgctggac

SEQ ID NO: 274197 - DNA, 25 bp, probe
tgctgtgagcctgcaggctttggaa

SEQ ID NO: 274198 - DNA, 25 bp, probe
tgcgtggagctgcaggcttcagctg

SEQ ID NO: 274199 - DNA, 25 bp, probe
tgcgtggagccaaggctcctgtctc

SEQ ID NO: 274200 - DNA, 25 bp, probe
tgcgtcggcatcaggtgtgtgtgcc

SEQ ID NO: 274201 - DNA, 25 bp, probe
tgcctgcgagcatctggcggagtac

SEQ ID NO: 274202 - DNA, 25 bp, probe
tgcctgcgagcatctggcggagtac

SEQ ID NO: 274203 - DNA, 25 bp, probe
tgccctgtgcaggctgcatggcaga

SEQ ID NO: 274204 - DNA, 25 bp, probe
tgcccatggctgggaacatgaccca

SEQ ID NO: 274205 - DNA, 25 bp, probe
tgccggagctggcaagtacaccgcc

SEQ ID NO: 274206 - DNA, 25 bp, probe
tccagagacgggaaaacacccagca

SEQ ID NO: 274207 - DNA, 25 bp, probe
tccagacagtgctgaggaaccccca

SEQ ID NO: 274208 - DNA, 25 bp, probe
tgccccagatctggaagggcctccc

SEQ ID NO: 274209 - DNA, 25 bp, probe
tcccaagttggaagggaccccagat

SEQ ID NO: 274210 - DNA, 25 bp, probe
tgccactggtttctggaatccccag

SEQ ID NO: 274211 - DNA, 25 bp, probe
tctcctgggagccttgaaaaaactg

SEQ ID NO: 274212 - DNA, 25 bp, probe
tgcccgggacatctacaaagacccc

SEQ ID NO: 274213 - DNA, 25 bp, probe
tgcccgggacatctacaaagacccc

SEQ ID NO: 274214 - DNA, 25 bp, probe
tgcccgaggaccggaataaaccctg

SEQ ID NO: 274215 - DNA, 25 bp, probe
tgcccaacgatccggagaaaaacac

SEQ ID NO: 274216 - DNA, 25 bp, probe
tcccactcaatacaaaaaggcccct

SEQ ID NO: 274217 - DNA, 25 bp, probe
tcctactcctattaaagaacctcgt

SEQ ID NO: 274218 - DNA, 25 bp, probe
tgccaccacctttagaggaatttcg

SEQ ID NO: 274219 - DNA, 25 bp, probe
tgcccaaggttgaagcaatgaataa

SEQ ID NO: 274220 - DNA, 25 bp, probe
tgcgaaaggttgtatgtgatcagaa

SEQ ID NO: 274221 - DNA, 25 bp, probe
tgcgagcaagaatttcatatatata

SEQ ID NO: 274222 - DNA, 25 bp, probe
tgcgagcaaagcattctcatcagtc

SEQ ID NO: 274223 - DNA, 25 bp, probe
tgccgcaaagctgtctactacacgg

SEQ ID NO: 274224 - DNA, 25 bp, probe
tgccctatgcactgttagcatgaga

SEQ ID NO: 274225 - DNA, 25 bp, probe
tgccggctactcggatggcagcaag

SEQ ID NO: 274226 - DNA, 25 bp, probe
tgcgcgttgactacgagcagatcaa

SEQ ID NO: 274227 - DNA, 25 bp, probe
tgctgtttgattatgcagagcatga

SEQ ID NO: 274228 - DNA, 25 bp, probe
tgctgtttcttcaagaggagaaaga

SEQ ID NO: 274229 - DNA, 25 bp, probe
tgcgctcgacccaagcagaagtaaa

SEQ ID NO: 274230 - DNA, 25 bp, probe
tgcgctctgccgatggcaggaggaa

SEQ ID NO: 274231 - DNA, 25 bp, probe
tgccgctactgcaggctcaagaaat

SEQ ID NO: 274232 - DNA, 25 bp, probe
tgctggctggtgggttgcaagaaat

SEQ ID NO: 274233 - DNA, 25 bp, probe
tgctggggctgaaggtcagaagtaa

SEQ ID NO: 274234 - DNA, 25 bp, probe
tgctggccgtgccggtgaaagtgac

SEQ ID NO: 274235 - DNA, 25 bp, probe
tgctggcatcaagaggtgggagggc

SEQ ID NO: 274236 - DNA, 25 bp, probe
tgctggctccactgggcggggagcc

SEQ ID NO: 274237 - DNA, 25 bp, probe
tgctggtacactgtgccatgggggt

SEQ ID NO: 274238 - DNA, 25 bp, probe
tgctggtacactgtgccatgggggt

SEQ ID NO: 274239 - DNA, 25 bp, probe
tgctggtacactgtgccatgggggt

SEQ ID NO: 274240 - DNA, 25 bp, probe
tgctggtacactgtgccatgggggt

SEQ ID NO: 274241 - DNA, 25 bp, probe
tgctggtcaccgggcaggaggtgga

SEQ ID NO: 274242 - DNA, 25 bp, probe
tgctggaagcctccgaggtggaaga

SEQ ID NO: 274243 - DNA, 25 bp, probe
tgctggacatcccgagagtgctgga

SEQ ID NO: 274244 - DNA, 25 bp, probe
tgctggccccaggacagtgatgaag

SEQ ID NO: 274245 - DNA, 25 bp, probe
tgcggccgcgatggccgtggaaggt

SEQ ID NO: 274246 - DNA, 25 bp, probe
tgcggccgcgatggccgtggaaggt

SEQ ID NO: 274247 - DNA, 25 bp, probe
tgctgggcgagatgccggaggggct

SEQ ID NO: 274248 - DNA, 25 bp, probe
tctgctggaaaagcggaggttggag

SEQ ID NO: 274249 - DNA, 25 bp, probe
tctctggcttaagtttagaagttag

SEQ ID NO: 274250 - DNA, 25 bp, probe
tccgtgattaagctttgtgactttg

SEQ ID NO: 274251 - DNA, 25 bp, probe
tgccagtttagagctcctggacagt

SEQ ID NO: 274252 - DNA, 25 bp, probe
tgccagtttggagctcctggaaggt

SEQ ID NO: 274253 - DNA, 25 bp, probe
tccttcttcgcagctttacagggtc

SEQ ID NO: 274254 - DNA, 25 bp, probe
tgccttttccaccgtcaaaggtgtg

SEQ ID NO: 274255 - DNA, 25 bp, probe
tgccttttccaccgtcaaaggtgtg

SEQ ID NO: 274256 - DNA, 25 bp, probe
tgccctttacacgtgtgcttggttt

SEQ ID NO: 274257 - DNA, 25 bp, probe
tgccttcgtgaaggcttttgttctt

SEQ ID NO: 274258 - DNA, 25 bp, probe
tccaagcccagggtttggctcctta

SEQ ID NO: 274259 - DNA, 25 bp, probe
tccaagcccagggtttggctcctta

SEQ ID NO: 274260 - DNA, 25 bp, probe
tccagaccaacgattttctcagtta

SEQ ID NO: 274261 - DNA, 25 bp, probe
tgccaaccaaagcagtcattttaaa

SEQ ID NO: 274262 - DNA, 25 bp, probe
tccactgccaaaagagtagttgctt

SEQ ID NO: 274263 - DNA, 25 bp, probe
tgcccccaattacctagatgtctat

SEQ ID NO: 274264 - DNA, 25 bp, probe
tgcctgcctcgtcaggctacaactt

SEQ ID NO: 274265 - DNA, 25 bp, probe
tgcctacatccacatgatgcccaac

SEQ ID NO: 274266 - DNA, 25 bp, probe
tgcctactccaagagctccaagagc

SEQ ID NO: 274267 - DNA, 25 bp, probe
tgcccctccagagacaggaaagaat

SEQ ID NO: 274268 - DNA, 25 bp, probe
tgcctccctggcagcacaggaaaag

SEQ ID NO: 274269 - DNA, 25 bp, probe
tgccatgtcacctccatagggaaag

SEQ ID NO: 274270 - DNA, 25 bp, probe
tgcctgaaaagtcccaaggagaagg

SEQ ID NO: 274271 - DNA, 25 bp, probe
tgcgtcccagggaccaagagaaaga

SEQ ID NO: 274272 - DNA, 25 bp, probe
tgcggcgctctgggaacaaggaaga

SEQ ID NO: 274273 - DNA, 25 bp, probe
tgctggctcctgggaacgagaacta

SEQ ID NO: 274274 - DNA, 25 bp, probe
ttggtcggggaaaatatagtgaagt

SEQ ID NO: 274275 - DNA, 25 bp, probe
taatttggggaaacctagagaagat

SEQ ID NO: 274276 - DNA, 25 bp, probe
tccttcgtggggaaccgcgagatag

SEQ ID NO: 274277 - DNA, 25 bp, probe
tgccttcggccaaagtgctttgaat

SEQ ID NO: 274278 - DNA, 25 bp, probe
tgccttcaacgccgactttcagaag

SEQ ID NO: 274279 - DNA, 25 bp, probe
tgccctcaacgaccactttgtcaag

SEQ ID NO: 274280 - DNA, 25 bp, probe
tgccctcaagcatggcaccttgggc

SEQ ID NO: 274281 - DNA, 25 bp, probe
tgcccaattcaaccaccgtgatgga

SEQ ID NO: 274282 - DNA, 25 bp, probe
tccactaatctacacccttaggaac

SEQ ID NO: 274283 - DNA, 25 bp, probe
tccagtaactacagtggcattagga

SEQ ID NO: 274284 - DNA, 25 bp, probe
tcgcgaacgccgggctggattacta

SEQ ID NO: 274285 - DNA, 25 bp, probe
tgccgacactgcggcagctgtggtc

SEQ ID NO: 274286 - DNA, 25 bp, probe
tgcgggactgctggcatgcagtgcc

SEQ ID NO: 274287 - DNA, 25 bp, probe
tgcgtgagtgctggcacgcagcgcc

SEQ ID NO: 274288 - DNA, 25 bp, probe
tgcgtgagtgctggcacgcagcgcc

SEQ ID NO: 274289 - DNA, 25 bp, probe
tgccgagatgctgagatgcgccgca

SEQ ID NO: 274290 - DNA, 25 bp, probe
tgccgagatgctgagatgcgccgca

SEQ ID NO: 274291 - DNA, 25 bp, probe
tgcctgggcttatgccctcagatgg

SEQ ID NO: 274292 - DNA, 25 bp, probe
tgcctatgcccctgggccagggatt

SEQ ID NO: 274293 - DNA, 25 bp, probe
tgccctctccaaagggtcgggaggg

SEQ ID NO: 274294 - DNA, 25 bp, probe
tgccgcttccagaagtgcctggcgg

SEQ ID NO: 274295 - DNA, 25 bp, probe
tgcgcatctgccaggtggtctggcg

SEQ ID NO: 274296 - DNA, 25 bp, probe
tgccatccacgcgaatctgtttgcg

SEQ ID NO: 274297 - DNA, 25 bp, probe
tgcccaccggagtcatttgatgtga

SEQ ID NO: 274298 - DNA, 25 bp, probe
tgcccaacacgttattcttgctgtt

SEQ ID NO: 274299 - DNA, 25 bp, probe
tgccccacctatctttggtatatga

SEQ ID NO: 274300 - DNA, 25 bp, probe
tccaggcctccacatttgagtttga

SEQ ID NO: 274301 - DNA, 25 bp, probe
tccagcggtccacattagagttgaa

SEQ ID NO: 274302 - DNA, 25 bp, probe
tccagggtgtagaatttgactcaaa

SEQ ID NO: 274303 - DNA, 25 bp, probe
tgccttggctgttgtatttgaattg

SEQ ID NO: 274304 - DNA, 25 bp, probe
tgcctcctctgtgtgtttaatagat

SEQ ID NO: 274305 - DNA, 25 bp, probe
tgcctcactattccttttggactga

SEQ ID NO: 274306 - DNA, 25 bp, probe
tgcctcactattccttttggactga

SEQ ID NO: 274307 - DNA, 25 bp, probe
tgcctcactcctctaggcaggggag

SEQ ID NO: 274308 - DNA, 25 bp, probe
tgcctcaccccttaccaatgagggc

SEQ ID NO: 274309 - DNA, 25 bp, probe
tccacaccctccgaggcaaagggca

SEQ ID NO: 274310 - DNA, 25 bp, probe
tgcgccttccccgagtggaaggcgc

SEQ ID NO: 274311 - DNA, 25 bp, probe
tgcccttcctcctgatggagtgtgc

SEQ ID NO: 274312 - DNA, 25 bp, probe
tgcccttcctcctgatggagtgtgc

SEQ ID NO: 274313 - DNA, 25 bp, probe
tgcccattggctgtgtatgacggga

SEQ ID NO: 274314 - DNA, 25 bp, probe
tgcccagtggtgcttaccatgtggg

SEQ ID NO: 274315 - DNA, 25 bp, probe
tgcccttgtatctttgcagtcattg

SEQ ID NO: 274316 - DNA, 25 bp, probe
tgcgacgtatattttcctttggaaa

SEQ ID NO: 274317 - DNA, 25 bp, probe
tgcgaatttattaaacttttgacaa

SEQ ID NO: 274318 - DNA, 25 bp, probe
tcccacgttttaactttctaagcat

SEQ ID NO: 274319 - DNA, 25 bp, probe
tgccccattcttttgtaatttaaat

SEQ ID NO: 274320 - DNA, 25 bp, probe
tgcccttctcatttggaaactaaaa

SEQ ID NO: 274321 - DNA, 25 bp, probe
tccttcatcctcctggaaatcatca

SEQ ID NO: 274322 - DNA, 25 bp, probe
tgcctttgacttggtgaatatccat

SEQ ID NO: 274323 - DNA, 25 bp, probe
tgcgctttgagcaccgagacttaca

SEQ ID NO: 274324 - DNA, 25 bp, probe
tgcgtttcagtgacctaccttaaaa

SEQ ID NO: 274325 - DNA, 25 bp, probe
tgcctttagaaccccaagtgaaaat

SEQ ID NO: 274326 - DNA, 25 bp, probe
tgccgtggagaaccccgagtattga

SEQ ID NO: 274327 - DNA, 25 bp, probe
tgcccttgggagccacgggattgta

SEQ ID NO: 274328 - DNA, 25 bp, probe
tgcccttggtggtcaggatgggtgg

SEQ ID NO: 274329 - DNA, 25 bp, probe
tgcccttttgtactaatggtgtcga

SEQ ID NO: 274330 - DNA, 25 bp, probe
tgccccctttgactgatcagtgtga

SEQ ID NO: 274331 - DNA, 25 bp, probe
tgccgattgttgacttgctagatgt

SEQ ID NO: 274332 - DNA, 25 bp, probe
tgccttctatttctgctttgtcaca

SEQ ID NO: 274333 - DNA, 25 bp, probe
tgcctgttatctgtggcgtttcatc

SEQ ID NO: 274334 - DNA, 25 bp, probe
tgccggtgttcactggggattcttt

SEQ ID NO: 274335 - DNA, 25 bp, probe
tgcccgagtcactgtggcagcattc

SEQ ID NO: 274336 - DNA, 25 bp, probe
tgcccaggtagctggagctgatcat

SEQ ID NO: 274337 - DNA, 25 bp, probe
tgcccaagtcagtcctggtggcatc

SEQ ID NO: 274338 - DNA, 25 bp, probe
tgcccagtactggccatctgatgga

SEQ ID NO: 274339 - DNA, 25 bp, probe
tgcgaacatactggctcttaggaga

SEQ ID NO: 274340 - DNA, 25 bp, probe
tgcgattctgcagccacaaagttga

SEQ ID NO: 274341 - DNA, 25 bp, probe
tgcgcgatgccgggatcaaagtctg

SEQ ID NO: 274342 - DNA, 25 bp, probe
tgcgcagtgggctgctaacacttgg

SEQ ID NO: 274343 - DNA, 25 bp, probe
tgctggtggtgcccgagaacgagaa

SEQ ID NO: 274344 - DNA, 25 bp, probe
tgctggatgcccaaccagattcgga

SEQ ID NO: 274345 - DNA, 25 bp, probe
tgctggagcccaatgctggtgttgg

SEQ ID NO: 274346 - DNA, 25 bp, probe
tgcggagtggcaactgggagctgga

SEQ ID NO: 274347 - DNA, 25 bp, probe
tgcggggcaaacagcggatgagcaa

SEQ ID NO: 274348 - DNA, 25 bp, probe
tgctgggggaccgtggggagatcat

SEQ ID NO: 274349 - DNA, 25 bp, probe
tgctgggggaccgtggggagatcat

SEQ ID NO: 274350 - DNA, 25 bp, probe
tgctggaaccttccatgggggtctg

SEQ ID NO: 274351 - DNA, 25 bp, probe
tgcggatagcccacatgctggaggg

SEQ ID NO: 274352 - DNA, 25 bp, probe
tgccttacagccacattggcagctg

SEQ ID NO: 274353 - DNA, 25 bp, probe
tgcgcttgacccatgctggaagcta

SEQ ID NO: 274354 - DNA, 25 bp, probe
tgcgcttgacccatgctggaagcta

SEQ ID NO: 274355 - DNA, 25 bp, probe
tgcgctatgagcttcttgaggaaaa

SEQ ID NO: 274356 - DNA, 25 bp, probe
tgcgctatgagcttcttgaggaaaa

SEQ ID NO: 274357 - DNA, 25 bp, probe
tgcgctgatgtgatctatgaagatg

SEQ ID NO: 274358 - DNA, 25 bp, probe
tgcctgtgcagattgcaatagacta

SEQ ID NO: 274359 - DNA, 25 bp, probe
tgcctggcagaatcacagtctcaca

SEQ ID NO: 274360 - DNA, 25 bp, probe
tgcctgaggtcattcacatgcttca

SEQ ID NO: 274361 - DNA, 25 bp, probe
gacagcagcaacagcagtgacagca

SEQ ID NO: 274362 - DNA, 25 bp, probe
tgcgctcggtgcgatactgatgatg

SEQ ID NO: 274363 - DNA, 25 bp, probe
tgcgtctgagatctctctgcataga

SEQ ID NO: 274364 - DNA, 25 bp, probe
tgcgctcatgagcgtctgtggagcc

SEQ ID NO: 274365 - DNA, 25 bp, probe
tgcctctgcatgtgttcaacagcct

SEQ ID NO: 274366 - DNA, 25 bp, probe
tgccctgcagagcaataacactata

SEQ ID NO: 274367 - DNA, 25 bp, probe
tgcccaatggagttgagaatctcaa

SEQ ID NO: 274368 - DNA, 25 bp, probe
tgcccaatggagttgagaatctcaa

SEQ ID NO: 274369 - DNA, 25 bp, probe
tgcccaagtggcctagtgttcaagt

SEQ ID NO: 274370 - DNA, 25 bp, probe
tgcccgttggtctatgattgacaag

SEQ ID NO: 274371 - DNA, 25 bp, probe
tgccctaatgtttcatttgacggtc

SEQ ID NO: 274372 - DNA, 25 bp, probe
tgccctttctttatctgtacagtca

SEQ ID NO: 274373 - DNA, 25 bp, probe
tgccctttctttatctgtacagtca

SEQ ID NO: 274374 - DNA, 25 bp, probe
tgcccttttatggatgccctacagg

SEQ ID NO: 274375 - DNA, 25 bp, probe
tgcctttttatgacttgcctactgc

SEQ ID NO: 274376 - DNA, 25 bp, probe
tgccttattatgacatggtgccttc

SEQ ID NO: 274377 - DNA, 25 bp, probe
tgccttattatgacatggtgccttc

SEQ ID NO: 274378 - DNA, 25 bp, probe
tgcctgtatttatgagatttgctgt

SEQ ID NO: 274379 - DNA, 25 bp, probe
tgctggttttctggatggttcccag

SEQ ID NO: 274380 - DNA, 25 bp, probe
tgcccctagtgtgagggctgcctca

SEQ ID NO: 274381 - DNA, 25 bp, probe
tgccggctatgtcggaagacgacga

SEQ ID NO: 274382 - DNA, 25 bp, probe
tgccgaggtctgcgtcgaagacaga

SEQ ID NO: 274383 - DNA, 25 bp, probe
tgccctgcagggtgtccaagagaga

SEQ ID NO: 274384 - DNA, 25 bp, probe
tgccctcaagcgcagcttcaaggaa

SEQ ID NO: 274385 - DNA, 25 bp, probe
tgcctcacacagccggtggcgaggc

SEQ ID NO: 274386 - DNA, 25 bp, probe
tgcctcacacagccggtggcgaggc

SEQ ID NO: 274387 - DNA, 25 bp, probe
tgcctcacacagccggtggcgaggc

SEQ ID NO: 274388 - DNA, 25 bp, probe
tgccttcacaagcagggatcagagc

SEQ ID NO: 274389 - DNA, 25 bp, probe
tgccctgcaaagaggctgattgagg

SEQ ID NO: 274390 - DNA, 25 bp, probe
tgccgctgcacaggtatggggtggg

SEQ ID NO: 274391 - DNA, 25 bp, probe
tgccctgacatcatcattcttgtgg

SEQ ID NO: 274392 - DNA, 25 bp, probe
tgcgagctggcacccacatcctgtg

SEQ ID NO: 274393 - DNA, 25 bp, probe
tctgacggataaacacctggaccca

SEQ ID NO: 274394 - DNA, 25 bp, probe
tctgacggataaacacctggaccca

SEQ ID NO: 274395 - DNA, 25 bp, probe
tgcggcggaatcacaggctgattac

SEQ ID NO: 274396 - DNA, 25 bp, probe
tgcgagtggactaacaacagctgta

SEQ ID NO: 274397 - DNA, 25 bp, probe
tgcctgctacacatacaacactgaa

SEQ ID NO: 274398 - DNA, 25 bp, probe
tgcgctgcatgagactacaaagaca

SEQ ID NO: 274399 - DNA, 25 bp, probe
tgcgctgcagataactcataggaat

SEQ ID NO: 274400 - DNA, 25 bp, probe
tgcgcagcatgcaagagctcagcac

SEQ ID NO: 274401 - DNA, 25 bp, probe
tgcgcgtctgaggctcagaccctgc

SEQ ID NO: 274402 - DNA, 25 bp, probe
tgcgtgtggatggtgcagccaccgg

SEQ ID NO: 274403 - DNA, 25 bp, probe
tgcgtgtggatggtgcagccaccgg

SEQ ID NO: 274404 - DNA, 25 bp, probe
tgcgtgggagggcgcacatcagggc

SEQ ID NO: 274405 - DNA, 25 bp, probe
tgccgggcagggcagactggagtct

SEQ ID NO: 274406 - DNA, 25 bp, probe
tgcccaggtggaacagcacgtaacc

SEQ ID NO: 274407 - DNA, 25 bp, probe
tccacaggtatgtaaaagacaatac

SEQ ID NO: 274408 - DNA, 25 bp, probe
tccacggaaacagaactcgatgcac

SEQ ID NO: 274409 - DNA, 25 bp, probe
tgcgccgggaaattgagatccaggc

SEQ ID NO: 274410 - DNA, 25 bp, probe
tgcgaccaggatccattgagacgta

SEQ ID NO: 274411 - DNA, 25 bp, probe
tgcgaccgtacgacgtgaaggacgt

SEQ ID NO: 274412 - DNA, 25 bp, probe
tgcgaccgtacgacgtgaaggacgt

SEQ ID NO: 274413 - DNA, 25 bp, probe
tgcccctggaagattaaaccagcct

SEQ ID NO: 274414 - DNA, 25 bp, probe
tgcctagaagggctccaaaccacct

SEQ ID NO: 274415 - DNA, 25 bp, probe
tccaaaaagggcttcaaggcccact

SEQ ID NO: 274416 - DNA, 25 bp, probe
tccaaaaagggcttcaaggcccact

SEQ ID NO: 274417 - DNA, 25 bp, probe
tccaaaaagggcttcaaggcccact

SEQ ID NO: 274418 - DNA, 25 bp, probe
tccaaaaagggcttcaaggcccact

SEQ ID NO: 274419 - DNA, 25 bp, probe
tccaaaaagggcttcaaggcccact

SEQ ID NO: 274420 - DNA, 25 bp, probe
tccaaaaaccagtcggcagaccaca

SEQ ID NO: 274421 - DNA, 25 bp, probe
tccaaagaacggcctacatacccag

SEQ ID NO: 274422 - DNA, 25 bp, probe
tccaaagaaacggctgactacattt

SEQ ID NO: 274423 - DNA, 25 bp, probe
tgccagaagtatttcctttcctttt

SEQ ID NO: 274424 - DNA, 25 bp, probe
tccaatacgattttctgttgcacct

SEQ ID NO: 274425 - DNA, 25 bp, probe
tgcccatcacgttttttctgaggct

SEQ ID NO: 274426 - DNA, 25 bp, probe
tgcccatcaggtctttctgtgtgtg

SEQ ID NO: 274427 - DNA, 25 bp, probe
tgcccagctgaatcttggcttctgg

SEQ ID NO: 274428 - DNA, 25 bp, probe
tgcctaaagctcgatgggttctgga

SEQ ID NO: 274429 - DNA, 25 bp, probe
tgccaaatatgtcctggggtataaa

SEQ ID NO: 274430 - DNA, 25 bp, probe
tgccattcttgtcctaaagcaattg

SEQ ID NO: 274431 - DNA, 25 bp, probe
tgccatggcaatctttagtgcactt

SEQ ID NO: 274432 - DNA, 25 bp, probe
tgcgctggctcacattatttatttc

SEQ ID NO: 274433 - DNA, 25 bp, probe
tgcgctggctcacattatttatttc

SEQ ID NO: 274434 - DNA, 25 bp, probe
tgcgattcatcatatatcattggat

SEQ ID NO: 274435 - DNA, 25 bp, probe
tgcgctctcagtcagatactgcgca

SEQ ID NO: 274436 - DNA, 25 bp, probe
tgcccatcagatccagatgttacaa

SEQ ID NO: 274437 - DNA, 25 bp, probe
tgcggcagcagacatggcttaccac

SEQ ID NO: 274438 - DNA, 25 bp, probe
tgcccagccagaatggatgtactac

SEQ ID NO: 274439 - DNA, 25 bp, probe
tgcccgtcaaatggatggctcccga

SEQ ID NO: 274440 - DNA, 25 bp, probe
tgccctgtgataaaatgtggcccag

SEQ ID NO: 274441 - DNA, 25 bp, probe
tccaagtgtactgttggccgcagca

SEQ ID NO: 274442 - DNA, 25 bp, probe
tgcccaggcatagttttggccgaaa

SEQ ID NO: 274443 - DNA, 25 bp, probe
tgccgaggctgagcgctttgcaata

SEQ ID NO: 274444 - DNA, 25 bp, probe
tgccgaggctgagcgctttgcaata

SEQ ID NO: 274445 - DNA, 25 bp, probe
tgcctgacccactgttgcagaatga

SEQ ID NO: 274446 - DNA, 25 bp, probe
tgcgtatcccactgcctatggtggg

SEQ ID NO: 274447 - DNA, 25 bp, probe
tgcgtatcccactgcctatggtggg

SEQ ID NO: 274448 - DNA, 25 bp, probe
tgcgggccacaagcacgatgagtga

SEQ ID NO: 274449 - DNA, 25 bp, probe
tgcgggtcataagcttgcgttgatt

SEQ ID NO: 274450 - DNA, 25 bp, probe
tcgaaatcagagccttaggactgtt

SEQ ID NO: 274451 - DNA, 25 bp, probe
tcgaatatcaggatgctgagggccc

SEQ ID NO: 274452 - DNA, 25 bp, probe
tgcgcaatgtggcattggggggccg

SEQ ID NO: 274453 - DNA, 25 bp, probe
tccaaggggttgcaggaacccgcac

SEQ ID NO: 274454 - DNA, 25 bp, probe
tgccaaggggaagagcgacacctcc

SEQ ID NO: 274455 - DNA, 25 bp, probe
tccaaccattaaggtccacaccatc

SEQ ID NO: 274456 - DNA, 25 bp, probe
tccaactctcaaacacggaggtcat

SEQ ID NO: 274457 - DNA, 25 bp, probe
tccctgcttctagcccagaagcgaa

SEQ ID NO: 274458 - DNA, 25 bp, probe
tgcccacaacttgccaaaacagata

SEQ ID NO: 274459 - DNA, 25 bp, probe
tgccgtagactgtcccgaaaatatt

SEQ ID NO: 274460 - DNA, 25 bp, probe
tgccttgagagtgacccaaagatga

SEQ ID NO: 274461 - DNA, 25 bp, probe
tgcctttgcatcagactctctaagg

SEQ ID NO: 274462 - DNA, 25 bp, probe
tgcctcttaactccttcacgaggaa

SEQ ID NO: 274463 - DNA, 25 bp, probe
tgcctcttagcagcctaaagcaagg

SEQ ID NO: 274464 - DNA, 25 bp, probe
tgccctttgatgacaccaatctcaa

SEQ ID NO: 274465 - DNA, 25 bp, probe
tgccctttgatgacaccaatctcaa

SEQ ID NO: 274466 - DNA, 25 bp, probe
tgccctgtgttatccagttatgaga

SEQ ID NO: 274467 - DNA, 25 bp, probe
tgcctgtgctctcaagacaaactga

SEQ ID NO: 274468 - DNA, 25 bp, probe
tgccatttcgcctgactcataatat

SEQ ID NO: 274469 - DNA, 25 bp, probe
tgcgcattttgcattccatatgaaa

SEQ ID NO: 274470 - DNA, 25 bp, probe
tgcgcacattccattagctataatt

SEQ ID NO: 274471 - DNA, 25 bp, probe
tgcgcacacttgatgaaggtgtttt

SEQ ID NO: 274472 - DNA, 25 bp, probe
tgcgacttcgccaagggcgttttca

SEQ ID NO: 274473 - DNA, 25 bp, probe
tgcccttcagccaggagtatttcct

SEQ ID NO: 274474 - DNA, 25 bp, probe
tgcccttaggcattaagtggttcct

SEQ ID NO: 274475 - DNA, 25 bp, probe
tgcccttaggcattaagtggttcct

SEQ ID NO: 274476 - DNA, 25 bp, probe
tgccctgagggcattagctggtcta

SEQ ID NO: 274477 - DNA, 25 bp, probe
tgccggacgacatgaagggcatctc

SEQ ID NO: 274478 - DNA, 25 bp, probe
tgccggacgagtgggaggtgtctcg

SEQ ID NO: 274479 - DNA, 25 bp, probe
tgcccagtaagcgccaggtggtggc

SEQ ID NO: 274480 - DNA, 25 bp, probe
tgcccagtgtcgggcctttgtggtc

SEQ ID NO: 274481 - DNA, 25 bp, probe
tgcccagtggatgcgccagattgtg

SEQ ID NO: 274482 - DNA, 25 bp, probe
tgcccagggacggccatgtgaagcc

SEQ ID NO: 274483 - DNA, 25 bp, probe
tccacaggaggacctcggcagagcc

SEQ ID NO: 274484 - DNA, 25 bp, probe
tgcccagcatgggaccctaagagcc

SEQ ID NO: 274485 - DNA, 25 bp, probe
tgcctcatcaagaacccagcggagc

SEQ ID NO: 274486 - DNA, 25 bp, probe
tccagccaagtagcccagggcatgg

SEQ ID NO: 274487 - DNA, 25 bp, probe
tccataaatgtcaccttgggggccc

SEQ ID NO: 274488 - DNA, 25 bp, probe
tccaagaattcaatgcccggcgtaa

SEQ ID NO: 274489 - DNA, 25 bp, probe
tccaaaatataaaccagagcctcta

SEQ ID NO: 274490 - DNA, 25 bp, probe
tccaaaatataaaccagagcctcta

SEQ ID NO: 274491 - DNA, 25 bp, probe
tccaagattgcagacttcggccttt

SEQ ID NO: 274492 - DNA, 25 bp, probe
tccaccatcagagaactgtcccttc

SEQ ID NO: 274493 - DNA, 25 bp, probe
tccaccatcagagaactgtcccttc

SEQ ID NO: 274494 - DNA, 25 bp, probe
tgcctgcagaagtgcaacgtgccct

SEQ ID NO: 274495 - DNA, 25 bp, probe
tcacgagaagttcagttacacccgc

SEQ ID NO: 274496 - DNA, 25 bp, probe
tccaggaagcctacagtcttcaccc

SEQ ID NO: 274497 - DNA, 25 bp, probe
tcctggaagcctgtgaattcctcag

SEQ ID NO: 274498 - DNA, 25 bp, probe
tcctggaagcctgtgaattcctcag

SEQ ID NO: 274499 - DNA, 25 bp, probe
tcccacaacctgccagactaggcta

SEQ ID NO: 274500 - DNA, 25 bp, probe
tgccaacaactagaacacggtgact

SEQ ID NO: 274501 - DNA, 25 bp, probe
tgccaacaactagaacacggtgact

SEQ ID NO: 274502 - DNA, 25 bp, probe
tccaagcgactagaccggagtgtct

SEQ ID NO: 274503 - DNA, 25 bp, probe
tctagtggaccagacgagtggggat

SEQ ID NO: 274504 - DNA, 25 bp, probe
tccaaatgtccagaggatgtgggaa

SEQ ID NO: 274505 - DNA, 25 bp, probe
tccaaaggccctaccagagggaaca

SEQ ID NO: 274506 - DNA, 25 bp, probe
tccaaggcccctaaaaactgcacaa

SEQ ID NO: 274507 - DNA, 25 bp, probe
tccaaggtcctgtgcaaatagtgtc

SEQ ID NO: 274508 - DNA, 25 bp, probe
tccaaactgacccgaagttgccatc

SEQ ID NO: 274509 - DNA, 25 bp, probe
tccccaagacggcggttgttattgg

SEQ ID NO: 274510 - DNA, 25 bp, probe
tgccatcaccgctgggtggtttttt

SEQ ID NO: 274511 - DNA, 25 bp, probe
tgcctttagtggtgtttcttgtttc

SEQ ID NO: 274512 - DNA, 25 bp, probe
tgccgcctttggcggttctgtttct

SEQ ID NO: 274513 - DNA, 25 bp, probe
tccccattttaacgggcgttgctct

SEQ ID NO: 274514 - DNA, 25 bp, probe
tccccagtttcctgagggaggctcc

SEQ ID NO: 274515 - DNA, 25 bp, probe
tccgggtttccatcatgtcaaggtc

SEQ ID NO: 274516 - DNA, 25 bp, probe
tccgggtttccatcatgtcaaggtc

SEQ ID NO: 274517 - DNA, 25 bp, probe
tccaagtgcatttcttaaataagtt

SEQ ID NO: 274518 - DNA, 25 bp, probe
tccaagtgcatttcttaaataagtt

SEQ ID NO: 274519 - DNA, 25 bp, probe
tccaacgcagtgtctcaaatgtagg

SEQ ID NO: 274520 - DNA, 25 bp, probe
tccaaccaggtggtctttcggggtg

SEQ ID NO: 274521 - DNA, 25 bp, probe
tccgagccaggtcaggcttcggagg

SEQ ID NO: 274522 - DNA, 25 bp, probe
tgccgaggagatcaaggtccagcca

SEQ ID NO: 274523 - DNA, 25 bp, probe
tgccgggtgttgtatgtgtggtgac

SEQ ID NO: 274524 - DNA, 25 bp, probe
tgccgggtgttgtatgtgtggtgac

SEQ ID NO: 274525 - DNA, 25 bp, probe
tgccattgggtttgtttggagccaa

SEQ ID NO: 274526 - DNA, 25 bp, probe
tgcgcgtgggtgtagctttgtgcat

SEQ ID NO: 274527 - DNA, 25 bp, probe
tgccgtcagccgaactttgttatgg

SEQ ID NO: 274528 - DNA, 25 bp, probe
tgccggccacataacatttgcactt

SEQ ID NO: 274529 - DNA, 25 bp, probe
tgcctgcgccagaagagctttgctg

SEQ ID NO: 274530 - DNA, 25 bp, probe
tgcctgctgccatagcagcaccttt

SEQ ID NO: 274531 - DNA, 25 bp, probe
tgcgctgctgaaaacgattcatatt

SEQ ID NO: 274532 - DNA, 25 bp, probe
tgcctgcaaatatgctgactgtatt

SEQ ID NO: 274533 - DNA, 25 bp, probe
tgcctagtcaggcctacattgatct

SEQ ID NO: 274534 - DNA, 25 bp, probe
tgcctcatgatgggcccatgtgtga

SEQ ID NO: 274535 - DNA, 25 bp, probe
tgcctcatgctaagactcagtgggg

SEQ ID NO: 274536 - DNA, 25 bp, probe
tgccctgttcgcatcagtggcgatg

SEQ ID NO: 274537 - DNA, 25 bp, probe
tgcctctgtccatttcaagggtgac

SEQ ID NO: 274538 - DNA, 25 bp, probe
tgcctttccttctaaagggaatgtt

SEQ ID NO: 274539 - DNA, 25 bp, probe
tccggtccttgctaaatctagatac

SEQ ID NO: 274540 - DNA, 25 bp, probe
tccgtgtacctcaagacctatgtta

SEQ ID NO: 274541 - DNA, 25 bp, probe
tccaggttccacaaaacttacgaag

SEQ ID NO: 274542 - DNA, 25 bp, probe
tccaggttccacaaaacttacgaag

SEQ ID NO: 274543 - DNA, 25 bp, probe
tccgtttccaaatacattccagtgt

SEQ ID NO: 274544 - DNA, 25 bp, probe
tccacattcccaaaaaatcccagga

SEQ ID NO: 274545 - DNA, 25 bp, probe
tccacattcccaaaaaatcccagga

SEQ ID NO: 274546 - DNA, 25 bp, probe
tgccccatcgcacaagaaacctgca

SEQ ID NO: 274547 - DNA, 25 bp, probe
tgccttgccgcagagaaaacaccaa

SEQ ID NO: 274548 - DNA, 25 bp, probe
tgcctccctgctgagaatattctcc

SEQ ID NO: 274549 - DNA, 25 bp, probe
tgcccaccatggtgcgaatcctgac

SEQ ID NO: 274550 - DNA, 25 bp, probe
tgcccacctggctggaaatacacac

SEQ ID NO: 274551 - DNA, 25 bp, probe
tgcctgcaccaggggtgcacaataa

SEQ ID NO: 274552 - DNA, 25 bp, probe
tgcctcggcagctggtgcgaaaatc

SEQ ID NO: 274553 - DNA, 25 bp, probe
tgcctcctcagatggggatttatct

SEQ ID NO: 274554 - DNA, 25 bp, probe
tgccaagtgcgagggggacatcttc

SEQ ID NO: 274555 - DNA, 25 bp, probe
tgcctagtgctaacgggcatgaccc

SEQ ID NO: 274556 - DNA, 25 bp, probe
tgcctgcggccaacatgatggctgg

SEQ ID NO: 274557 - DNA, 25 bp, probe
tgccgcagaccattatctggcggga

SEQ ID NO: 274558 - DNA, 25 bp, probe
tgcccaccctgtagctgaggcagga

SEQ ID NO: 274559 - DNA, 25 bp, probe
tgcgcctttctgccggacgcgagca

SEQ ID NO: 274560 - DNA, 25 bp, probe
tgcgcgtctatcgcaggagtgctga

SEQ ID NO: 274561 - DNA, 25 bp, probe
tgcgcgtctatcgcaggagtgctga

SEQ ID NO: 274562 - DNA, 25 bp, probe
tgcgagcactacctcagaatgacga

SEQ ID NO: 274563 - DNA, 25 bp, probe
tgcgatacatgagcccagaacagat

SEQ ID NO: 274564 - DNA, 25 bp, probe
tgcgcaacaagccctacagcaagaa

SEQ ID NO: 274565 - DNA, 25 bp, probe
tgcgaggccaaacagcagctagaat

SEQ ID NO: 274566 - DNA, 25 bp, probe
tgcgaggccaaacagcagctagaat

SEQ ID NO: 274567 - DNA, 25 bp, probe
tcgtgggaacagcgcagtacgtttc

SEQ ID NO: 274568 - DNA, 25 bp, probe
tcagtcccaaactacagttcttgtt

SEQ ID NO: 274569 - DNA, 25 bp, probe
tcaccaccaaactctatgacggctt

SEQ ID NO: 274570 - DNA, 25 bp, probe
tccataccgaactccgaagagtgtg

SEQ ID NO: 274571 - DNA, 25 bp, probe
tccactaggaccacccaaagtaggt

SEQ ID NO: 274572 - DNA, 25 bp, probe
tccaaaggacctgaccttcttgaag

SEQ ID NO: 274573 - DNA, 25 bp, probe
tccaaggtgcacattttccacggaa

SEQ ID NO: 274574 - DNA, 25 bp, probe
tccaaggcttttgagacacaaggga

SEQ ID NO: 274575 - DNA, 25 bp, probe
tccaaggttctggaggcccatttgg

SEQ ID NO: 274576 - DNA, 25 bp, probe
tccaactgaatatgagaggaacggg

SEQ ID NO: 274577 - DNA, 25 bp, probe
tccaggccattaaaatggaccggta

SEQ ID NO: 274578 - DNA, 25 bp, probe
tccacctcatgtctaagaacgggga

SEQ ID NO: 274579 - DNA, 25 bp, probe
tgccaccgtgtataaatcctggtgt

SEQ ID NO: 274580 - DNA, 25 bp, probe
tcccccatctaaaatacccatgctg

SEQ ID NO: 274581 - DNA, 25 bp, probe
tgccccactccaaaaaccagtgtgt

SEQ ID NO: 274582 - DNA, 25 bp, probe
tccagcgcctccaaaacggaggtct

SEQ ID NO: 274583 - DNA, 25 bp, probe
tccagctcctggatgaacggaaatc

SEQ ID NO: 274584 - DNA, 25 bp, probe
tccagctactccctgaatcaggaca

SEQ ID NO: 274585 - DNA, 25 bp, probe
tgcgcagcattatcctgtgtcagga

SEQ ID NO: 274586 - DNA, 25 bp, probe
tgccgctgatgagactgctgtgcag

SEQ ID NO: 274587 - DNA, 25 bp, probe
tgccgtgatcagaagtcatgcatga

SEQ ID NO: 274588 - DNA, 25 bp, probe
tgccggacgcgagcagatgaacgaa

SEQ ID NO: 274589 - DNA, 25 bp, probe
tgccgctacctggactggatcaaga

SEQ ID NO: 274590 - DNA, 25 bp, probe
tgccttacctggacatgtatcagat

SEQ ID NO: 274591 - DNA, 25 bp, probe
tgcctaagcctgcttgtagccagtg

SEQ ID NO: 274592 - DNA, 25 bp, probe
tgcctaagcctgcttgtagccagtg

SEQ ID NO: 274593 - DNA, 25 bp, probe
tcgtatggccctagcattactagat

SEQ ID NO: 274594 - DNA, 25 bp, probe
tcagtagacctcctgcaaaccaggt

SEQ ID NO: 274595 - DNA, 25 bp, probe
tcgatgagacctgtacccgatttta

SEQ ID NO: 274596 - DNA, 25 bp, probe
tcagaaactaccaccaaattatcca

SEQ ID NO: 274597 - DNA, 25 bp, probe
tcataaagaaccacatccgtttccc

SEQ ID NO: 274598 - DNA, 25 bp, probe
tctacaaagcccactactttttcgc

SEQ ID NO: 274599 - DNA, 25 bp, probe
tctcctgaacccacaaattattctt

SEQ ID NO: 274600 - DNA, 25 bp, probe
tgcccaaactccaaagaatctatgg

SEQ ID NO: 274601 - DNA, 25 bp, probe
tgccaaaaccaggcatccaatttgt

SEQ ID NO: 274602 - DNA, 25 bp, probe
tgccaccattctggacatcatcaag

SEQ ID NO: 274603 - DNA, 25 bp, probe
tgccccactctgaactaaagaagga

SEQ ID NO: 274604 - DNA, 25 bp, probe
tgccccagttgcaccaaggagtggg

SEQ ID NO: 274605 - DNA, 25 bp, probe
tgccccagaggcatccttgggtggc

SEQ ID NO: 274606 - DNA, 25 bp, probe
tgcccagagggagtttgcgggggcg

SEQ ID NO: 274607 - DNA, 25 bp, probe
tgccccacggtggggagggctggca

SEQ ID NO: 274608 - DNA, 25 bp, probe
tgccccactgagccggggagagtgg

SEQ ID NO: 274609 - DNA, 25 bp, probe
tgccccactgagccggggagagtgg

SEQ ID NO: 274610 - DNA, 25 bp, probe
tgcccagggtggccgtggaagggac

SEQ ID NO: 274611 - DNA, 25 bp, probe
tgcccaggtaggcgtgagagtgtgg

SEQ ID NO: 274612 - DNA, 25 bp, probe
tgcctggtgtcacgccaggaggctg

SEQ ID NO: 274613 - DNA, 25 bp, probe
tgccggaatatcagcaggcggctat

SEQ ID NO: 274614 - DNA, 25 bp, probe
tgccggaatatcagcaggcggctat

SEQ ID NO: 274615 - DNA, 25 bp, probe
tgcccctgaatcatgggcacggagg

SEQ ID NO: 274616 - DNA, 25 bp, probe
tgcgcctgggacaggtctcggagga

SEQ ID NO: 274617 - DNA, 25 bp, probe
tgcccacggacagggatctcggtgg

SEQ ID NO: 274618 - DNA, 25 bp, probe
tgcccacggacagggatctcggtgg

SEQ ID NO: 274619 - DNA, 25 bp, probe
tgcccccaggaggagatgaccagtg

SEQ ID NO: 274620 - DNA, 25 bp, probe
tgcccgggcagctcaagaagcagct

SEQ ID NO: 274621 - DNA, 25 bp, probe
tgccttgggctgtgtcaacagcagc

SEQ ID NO: 274622 - DNA, 25 bp, probe
tgccttaccatgtggcagatcccac

SEQ ID NO: 274623 - DNA, 25 bp, probe
tgccttaccatgtggcagatcccac

SEQ ID NO: 274624 - DNA, 25 bp, probe
tccctgaaaggcagcagaccctcta

SEQ ID NO: 274625 - DNA, 25 bp, probe
tccgaaagagggccaggtcctaagc

SEQ ID NO: 274626 - DNA, 25 bp, probe
tgcccagggatgctggaggtccaca

SEQ ID NO: 274627 - DNA, 25 bp, probe
tgccggccagagctgaggggccaga

SEQ ID NO: 274628 - DNA, 25 bp, probe
tgcccgtcatggaagaggcggccat

SEQ ID NO: 274629 - DNA, 25 bp, probe
tgcgccttcaggaggatgcggacgg

SEQ ID NO: 274630 - DNA, 25 bp, probe
tgcgcgaatacgaggccctcaaggg

SEQ ID NO: 274631 - DNA, 25 bp, probe
tgccagaaaggcagtctcccaagga

SEQ ID NO: 274632 - DNA, 25 bp, probe
tgccaagaaaagacctcaccaaaag

SEQ ID NO: 274633 - DNA, 25 bp, probe
tgccataaagaggatcgaccagtca

SEQ ID NO: 274634 - DNA, 25 bp, probe
tgccaagtcgactatgccttagaca

SEQ ID NO: 274635 - DNA, 25 bp, probe
tgcgccagattgtgtcctttgacaa

SEQ ID NO: 274636 - DNA, 25 bp, probe
tgcgctcgatgtaagccattcctgc

SEQ ID NO: 274637 - DNA, 25 bp, probe
tgcgctcgatgtaagccattcctgc

SEQ ID NO: 274638 - DNA, 25 bp, probe
tgcccagatgatgtgctagtcctgg

SEQ ID NO: 274639 - DNA, 25 bp, probe
tgcctcagatctgctgtagccagtg

SEQ ID NO: 274640 - DNA, 25 bp, probe
tgcccaatcccagtaatgctgctgc

SEQ ID NO: 274641 - DNA, 25 bp, probe
tgccacgaccaagtgacagcaatgc

SEQ ID NO: 274642 - DNA, 25 bp, probe
tgcctgcgaccaatcatggagccac

SEQ ID NO: 274643 - DNA, 25 bp, probe
tgcgctgtgaccttctgttgggcgc

SEQ ID NO: 274644 - DNA, 25 bp, probe
tgcgcatgttccagcgcttactggc

SEQ ID NO: 274645 - DNA, 25 bp, probe
tgcctgtacatcacgcttagccagg

SEQ ID NO: 274646 - DNA, 25 bp, probe
tgcctgtacatcacgcttagccagg

SEQ ID NO: 274647 - DNA, 25 bp, probe
tgccatgaagcagtacgaatgcagc

SEQ ID NO: 274648 - DNA, 25 bp, probe
tgcctgcagagagtatagaatacac

SEQ ID NO: 274649 - DNA, 25 bp, probe
tgcccagacagtcatgactagcaga

SEQ ID NO: 274650 - DNA, 25 bp, probe
tgcccagacagtcatgactagcaga

SEQ ID NO: 274651 - DNA, 25 bp, probe
tgcccagagggcgatgcctcagaat

SEQ ID NO: 274652 - DNA, 25 bp, probe
tgcccagggcgcctggtacatcatt

SEQ ID NO: 274653 - DNA, 25 bp, probe
tgccctggacctaagtgacatcaac

SEQ ID NO: 274654 - DNA, 25 bp, probe
tgccctgtgactgcttgtaaagcta

SEQ ID NO: 274655 - DNA, 25 bp, probe
tgcccatggagcgcgtgtttgacta

SEQ ID NO: 274656 - DNA, 25 bp, probe
tgcccagattctgaggttctgcact

SEQ ID NO: 274657 - DNA, 25 bp, probe
tgcccgcaatgtgctggtgtctgag

SEQ ID NO: 274658 - DNA, 25 bp, probe
tgcccgcaatgtgctggtgtctgag

SEQ ID NO: 274659 - DNA, 25 bp, probe
tgcccatgactagttggtggataga

SEQ ID NO: 274660 - DNA, 25 bp, probe
tgcccaccaactggtgatggaaggt

SEQ ID NO: 274661 - DNA, 25 bp, probe
tgcctgaccactgggtgtggacggt

SEQ ID NO: 274662 - DNA, 25 bp, probe
tgccaggcctacgaattggccgact

SEQ ID NO: 274663 - DNA, 25 bp, probe
tgccagcgactgtctcagactgggc

SEQ ID NO: 274664 - DNA, 25 bp, probe
tgccacgcatcttcatgaagggcgc

SEQ ID NO: 274665 - DNA, 25 bp, probe
tgcccgctataccaatgggcacctc

SEQ ID NO: 274666 - DNA, 25 bp, probe
tgcccctgatcccagaaggaatgct

SEQ ID NO: 274667 - DNA, 25 bp, probe
tgcccctgaacccaagagtgatgta

SEQ ID NO: 274668 - DNA, 25 bp, probe
tgccctccaagaccaaggtggcttg

SEQ ID NO: 274669 - DNA, 25 bp, probe
tgccgcccgagatatgagggagctt

SEQ ID NO: 274670 - DNA, 25 bp, probe
tgccgcccgagatatgagggagctt

SEQ ID NO: 274671 - DNA, 25 bp, probe
tgccgcccgagatatgagggagctt

SEQ ID NO: 274672 - DNA, 25 bp, probe
tgcccaccacagaagaggtggactg

SEQ ID NO: 274673 - DNA, 25 bp, probe
tgcctcagcctcctgagtagctgga

SEQ ID NO: 274674 - DNA, 25 bp, probe
tgcccatgcctgctatcgagcatga

SEQ ID NO: 274675 - DNA, 25 bp, probe
tgccgatgccgtaaaagcaagtgct

SEQ ID NO: 274676 - DNA, 25 bp, probe
tgccagagtactaaacagcttcctt

SEQ ID NO: 274677 - DNA, 25 bp, probe
tgccaggctacagacacgtgtacct

SEQ ID NO: 274678 - DNA, 25 bp, probe
tgccgccaacgatgcaagtgtgact

SEQ ID NO: 274679 - DNA, 25 bp, probe
tgcccccactgcttataatgctggt

SEQ ID NO: 274680 - DNA, 25 bp, probe
tgcccaccaacgaatcaatgtttta

SEQ ID NO: 274681 - DNA, 25 bp, probe
tgcctgtccaagggctcaagacttt

SEQ ID NO: 274682 - DNA, 25 bp, probe
tgccatgtcatctggaataatactt

SEQ ID NO: 274683 - DNA, 25 bp, probe
tgcctctctcaggagtatcttacct

SEQ ID NO: 274684 - DNA, 25 bp, probe
tgcctttcagcgtccagttaactgc

SEQ ID NO: 274685 - DNA, 25 bp, probe
tgccctatgaaggccagttacactg

SEQ ID NO: 274686 - DNA, 25 bp, probe
tgccaccaaaggccagggtcactga

SEQ ID NO: 274687 - DNA, 25 bp, probe
tgccctgcaaaccgtgaggtcacaa

SEQ ID NO: 274688 - DNA, 25 bp, probe
tgccctgcaaaccgtgaggtcacaa

SEQ ID NO: 274689 - DNA, 25 bp, probe
tccacatcaaaccgggggctaaggt

SEQ ID NO: 274690 - DNA, 25 bp, probe
tgccactccagagctgggggctaaa

SEQ ID NO: 274691 - DNA, 25 bp, probe
tccagcatccgtgggtcacaggtaa

SEQ ID NO: 274692 - DNA, 25 bp, probe
tgcccatccttggacatcgagacta

SEQ ID NO: 274693 - DNA, 25 bp, probe
tgccctgctttggtatcgtggataa

SEQ ID NO: 274694 - DNA, 25 bp, probe
tgccctttatgtgtgtgggtgaaac

SEQ ID NO: 274695 - DNA, 25 bp, probe
tgcccagttcttcttgtgaagaaag

SEQ ID NO: 274696 - DNA, 25 bp, probe
tgcccacttcttctaggcagtgtga

SEQ ID NO: 274697 - DNA, 25 bp, probe
tccaacttgtgttctcagtgcagtt

SEQ ID NO: 274698 - DNA, 25 bp, probe
tgccaccattttgtgcattcgttct

SEQ ID NO: 274699 - DNA, 25 bp, probe
tgcccaatattttacattgttactg

SEQ ID NO: 274700 - DNA, 25 bp, probe
tcccaatttgccacttggtattgag

SEQ ID NO: 274701 - DNA, 25 bp, probe
tccaaaatcttccttatgtgtaacg

SEQ ID NO: 274702 - DNA, 25 bp, probe
tcctgggtagtctgtgcttgtaatc

SEQ ID NO: 274703 - DNA, 25 bp, probe
tcctgggtagtctgtgcttgtaatc

SEQ ID NO: 274704 - DNA, 25 bp, probe
tcctgggtagtctgtgcttgtaatc

SEQ ID NO: 274705 - DNA, 25 bp, probe
tccaggtaagtccagatgcttctga

SEQ ID NO: 274706 - DNA, 25 bp, probe
tgccattgctgaaatccgacgacta

SEQ ID NO: 274707 - DNA, 25 bp, probe
tgcctggttcaagagaagttcagat

SEQ ID NO: 274708 - DNA, 25 bp, probe
tgcctcctccaagaatgacttcatt

SEQ ID NO: 274709 - DNA, 25 bp, probe
tgccctctccaagcatttggtcatg

SEQ ID NO: 274710 - DNA, 25 bp, probe
tgccctctccaagcatttggtcatg

SEQ ID NO: 274711 - DNA, 25 bp, probe
tccactttgccattcttcatggtca

SEQ ID NO: 274712 - DNA, 25 bp, probe
tccacgttggcagaatcatttacat

SEQ ID NO: 274713 - DNA, 25 bp, probe
tgccacgtcacatccaattaataat

SEQ ID NO: 274714 - DNA, 25 bp, probe
tgcctctgtctatttcaatatagaa

SEQ ID NO: 274715 - DNA, 25 bp, probe
tgccttatcttcttccaaatgtact

SEQ ID NO: 274716 - DNA, 25 bp, probe
tgcctgcttcttggctaaagtgtac

SEQ ID NO: 274717 - DNA, 25 bp, probe
tgcctccagctgtgcctgagaggta

SEQ ID NO: 274718 - DNA, 25 bp, probe
tgcccaagctgaatgccgagaagcc

SEQ ID NO: 274719 - DNA, 25 bp, probe
tgcccgagctttgcagacatagccc

SEQ ID NO: 274720 - DNA, 25 bp, probe
tgcccagatgtttggcaacatcaag

SEQ ID NO: 274721 - DNA, 25 bp, probe
tgccagggtctgtccagatcacaag

SEQ ID NO: 274722 - DNA, 25 bp, probe
tgccaggaactgaccagctcagcga

SEQ ID NO: 274723 - DNA, 25 bp, probe
tgccaggaactgaccagctcagcga

SEQ ID NO: 274724 - DNA, 25 bp, probe
tcccaacactgcactgccgaagtgt

SEQ ID NO: 274725 - DNA, 25 bp, probe
tccaaagcactgggtgccgacgaca

SEQ ID NO: 274726 - DNA, 25 bp, probe
tccagagacttgttccccatggact

SEQ ID NO: 274727 - DNA, 25 bp, probe
tccagagacttgttccccatggact

SEQ ID NO: 274728 - DNA, 25 bp, probe
tccaaccaagatatcccaggacgtt

SEQ ID NO: 274729 - DNA, 25 bp, probe
tccaagctaagcactgccactgggg

SEQ ID NO: 274730 - DNA, 25 bp, probe
tccaatccaagatggcaacgaggac

SEQ ID NO: 274731 - DNA, 25 bp, probe
tgccctctatggtcttcaacaagga

SEQ ID NO: 274732 - DNA, 25 bp, probe
tgccctctattggctaccagagcag

SEQ ID NO: 274733 - DNA, 25 bp, probe
tgccttttgtggtcatcacagccgc

SEQ ID NO: 274734 - DNA, 25 bp, probe
tgccttttgtggtcatcacagccgc

SEQ ID NO: 274735 - DNA, 25 bp, probe
tgccttgtagagatgcagcctgccc

SEQ ID NO: 274736 - DNA, 25 bp, probe
tgccttctgaacatgctccaggcca

SEQ ID NO: 274737 - DNA, 25 bp, probe
tgccttctgaacatgctccaggcca

SEQ ID NO: 274738 - DNA, 25 bp, probe
tgccatttgaccatctcgggaagtg

SEQ ID NO: 274739 - DNA, 25 bp, probe
tgcccattgacctctagtggtgagt

SEQ ID NO: 274740 - DNA, 25 bp, probe
tgcccattgaccccaggggtgtgct

SEQ ID NO: 274741 - DNA, 25 bp, probe
tgcccttacacgtgcgtgtgagtgt

SEQ ID NO: 274742 - DNA, 25 bp, probe
tgccctgctacaggaagagtgggag

SEQ ID NO: 274743 - DNA, 25 bp, probe
tgccctccaacttagtgatgaagag

SEQ ID NO: 274744 - DNA, 25 bp, probe
tgccctgccaaccttgacaaatggc

SEQ ID NO: 274745 - DNA, 25 bp, probe
tgcccgcccacgatggatgaagtgc

SEQ ID NO: 274746 - DNA, 25 bp, probe
tgcccgagcccaggtgaggagaagc

SEQ ID NO: 274747 - DNA, 25 bp, probe
tgccgacgccgccggaaagcgtgcc

SEQ ID NO: 274748 - DNA, 25 bp, probe
tgccgggcgctggaggagaggcgga

SEQ ID NO: 274749 - DNA, 25 bp, probe
tgcctggagtgggcaccaagggcct

SEQ ID NO: 274750 - DNA, 25 bp, probe
tgcctgggtatggtgatccggtcca

SEQ ID NO: 274751 - DNA, 25 bp, probe
tgcctggagtgtcggatcctgtgag

SEQ ID NO: 274752 - DNA, 25 bp, probe
tgcctggagtgtcggatcctgtgag

SEQ ID NO: 274753 - DNA, 25 bp, probe
tgcctgttgagtcagatgctttcat

SEQ ID NO: 274754 - DNA, 25 bp, probe
tgccggagagtgtcagaactcttct

SEQ ID NO: 274755 - DNA, 25 bp, probe
tccggcgcaatgttgcatcagctct

SEQ ID NO: 274756 - DNA, 25 bp, probe
tgccttgcagcactgttgatgggta

SEQ ID NO: 274757 - DNA, 25 bp, probe
tgccctcatctgctggagatcgata

SEQ ID NO: 274758 - DNA, 25 bp, probe
tgccagcatcactggtatgatgtat

SEQ ID NO: 274759 - DNA, 25 bp, probe
tgccagcatcactggtatgatgtat

SEQ ID NO: 274760 - DNA, 25 bp, probe
tgccgtcacatgacgtctatcctcc

SEQ ID NO: 274761 - DNA, 25 bp, probe
tgccctcacagtggtatgtgctgct

SEQ ID NO: 274762 - DNA, 25 bp, probe
tgccctctcactggacagtggtgcc

SEQ ID NO: 274763 - DNA, 25 bp, probe
tgccctctcactggacagtggtgcc

SEQ ID NO: 274764 - DNA, 25 bp, probe
tgccctctcactggacagtggtgcc

SEQ ID NO: 274765 - DNA, 25 bp, probe
tgcctgtctcactcacagtggatat

SEQ ID NO: 274766 - DNA, 25 bp, probe
tgccgctcagactccgaggatgagt

SEQ ID NO: 274767 - DNA, 25 bp, probe
tgccgatgatgaggaccgaagtgat

SEQ ID NO: 274768 - DNA, 25 bp, probe
tgccgaggagcgccaagaagatgtc

SEQ ID NO: 274769 - DNA, 25 bp, probe
tgccgaggagccaggcaacttcagt

SEQ ID NO: 274770 - DNA, 25 bp, probe
tgcccagggcccaagagacttagat

SEQ ID NO: 274771 - DNA, 25 bp, probe
tgccaagtctcggaaggacattggt

SEQ ID NO: 274772 - DNA, 25 bp, probe
tgccccagctgccaaaggagagtgg

SEQ ID NO: 274773 - DNA, 25 bp, probe
tgcccccacaagccatggagaggag

SEQ ID NO: 274774 - DNA, 25 bp, probe
tgcccctcaccagcaagaggcatga

SEQ ID NO: 274775 - DNA, 25 bp, probe
tgcccctcaccagcaagaggcatga

SEQ ID NO: 274776 - DNA, 25 bp, probe
tgccctccatgcagtgcaaacacag

SEQ ID NO: 274777 - DNA, 25 bp, probe
tgccctccatgcagtgcaaacacag

SEQ ID NO: 274778 - DNA, 25 bp, probe
tgcctctgccatgcccagagaatca

SEQ ID NO: 274779 - DNA, 25 bp, probe
tgcctcccttcatgcatggaaattc

SEQ ID NO: 274780 - DNA, 25 bp, probe
tgcccctctgtatgagctcatgaag

SEQ ID NO: 274781 - DNA, 25 bp, probe
tgccgcctggtgatacagcatgagg

SEQ ID NO: 274782 - DNA, 25 bp, probe
tgccctgcgggtcacaggagggagg

SEQ ID NO: 274783 - DNA, 25 bp, probe
tgccctgggtgaacagcagtgaggc

SEQ ID NO: 274784 - DNA, 25 bp, probe
tgcccaggctggagtgcagtggcac

SEQ ID NO: 274785 - DNA, 25 bp, probe
tgcccaggctggagtgcagtggcgt

SEQ ID NO: 274786 - DNA, 25 bp, probe
tgccaagcgcttttacgtggcttct

SEQ ID NO: 274787 - DNA, 25 bp, probe
tgcccaggtgtcttttgggtctctc

SEQ ID NO: 274788 - DNA, 25 bp, probe
tgccgctggctgaactttgggttca

SEQ ID NO: 274789 - DNA, 25 bp, probe
tgcccatggctgggccgtggggaga

SEQ ID NO: 274790 - DNA, 25 bp, probe
tgccctggcgagggcgtttggagag

SEQ ID NO: 274791 - DNA, 25 bp, probe
tgcctgtgggggtccatttgggtac

SEQ ID NO: 274792 - DNA, 25 bp, probe
tgcctttggccttactttgtgggaa

SEQ ID NO: 274793 - DNA, 25 bp, probe
tgcccttggcttcattgtttgtgga

SEQ ID NO: 274794 - DNA, 25 bp, probe
tgcccttggagaccttatctatgtg

SEQ ID NO: 274795 - DNA, 25 bp, probe
tgcctgcttagatgataaaatgagg

SEQ ID NO: 274796 - DNA, 25 bp, probe
tgccacattaaattgataacatgga

SEQ ID NO: 274797 - DNA, 25 bp, probe
tgccctcaggcagcagagaactggc

SEQ ID NO: 274798 - DNA, 25 bp, probe
tgccgctgggacaagagacgctggc

SEQ ID NO: 274799 - DNA, 25 bp, probe
taggccttgcctaggcatagcctgc

SEQ ID NO: 274800 - DNA, 25 bp, probe
tgccgatatggatggcgcaccaagc

SEQ ID NO: 274801 - DNA, 25 bp, probe
tgccgatatgtgagacgaatgatgg

SEQ ID NO: 274802 - DNA, 25 bp, probe
tgccgcagaggtaactgaggagagg

SEQ ID NO: 274803 - DNA, 25 bp, probe
tgcccgagctgaagacgagcgcggg

SEQ ID NO: 274804 - DNA, 25 bp, probe
tgcccgagctgaagacgagcgcggg

SEQ ID NO: 274805 - DNA, 25 bp, probe
tgccctggcgatgggccagaggcgg

SEQ ID NO: 274806 - DNA, 25 bp, probe
tgcccgtctgatggggagatggctg

SEQ ID NO: 274807 - DNA, 25 bp, probe
tgccttgttgatgtggacatgagcc

SEQ ID NO: 274808 - DNA, 25 bp, probe
tgccgctgcttgagtggacagcagc

SEQ ID NO: 274809 - DNA, 25 bp, probe
tgcccgtcatgggctggaactgcct

SEQ ID NO: 274810 - DNA, 25 bp, probe
tgcccggatgtcggatgcagttctc

SEQ ID NO: 274811 - DNA, 25 bp, probe
tgcccgtatgtgcgtgcatgtgtat

SEQ ID NO: 274812 - DNA, 25 bp, probe
tgccggaagggcatcgtgtgcaacc

SEQ ID NO: 274813 - DNA, 25 bp, probe
tgccatgtaaggcttggtgccagcc

SEQ ID NO: 274814 - DNA, 25 bp, probe
tgccgctgagaagggttgatcctgc

SEQ ID NO: 274815 - DNA, 25 bp, probe
tgccgggatcaaagtctgttctggc

SEQ ID NO: 274816 - DNA, 25 bp, probe
tccggagattagatagttctgggga

SEQ ID NO: 274817 - DNA, 25 bp, probe
tctcagaggtttgtggtttagggga

SEQ ID NO: 274818 - DNA, 25 bp, probe
tacagggtttagggtcctcaggctg

SEQ ID NO: 274819 - DNA, 25 bp, probe
tacagggtttagggtcctcaggctg

SEQ ID NO: 274820 - DNA, 25 bp, probe
tcctgccctttctgtacctgggcag

SEQ ID NO: 274821 - DNA, 25 bp, probe
tgccccgtgttcagtagcatctggg

SEQ ID NO: 274822 - DNA, 25 bp, probe
tgcctcagccttccaagtagctggg

SEQ ID NO: 274823 - DNA, 25 bp, probe
tgcctcagcttcccaaagtgctggg

SEQ ID NO: 274824 - DNA, 25 bp, probe
tgcctcagcttcccaaagtgctggg

SEQ ID NO: 274825 - DNA, 25 bp, probe
tgcctcagactcccataatggtatg

SEQ ID NO: 274826 - DNA, 25 bp, probe
tccttactcgaagagcttagaaaca

SEQ ID NO: 274827 - DNA, 25 bp, probe
tcccaaataatgtcggcttacaaaa

SEQ ID NO: 274828 - DNA, 25 bp, probe
tcccaaacaagggacttcactggag

SEQ ID NO: 274829 - DNA, 25 bp, probe
tgccacaaaaacaagtgcccccgac

SEQ ID NO: 274830 - DNA, 25 bp, probe
tccaaaagcaacaactgggccccca

SEQ ID NO: 274831 - DNA, 25 bp, probe
tccatgaaaaccaggggcttgccca

SEQ ID NO: 274832 - DNA, 25 bp, probe
tgccataaaaccagcgagtgtcgtg

SEQ ID NO: 274833 - DNA, 25 bp, probe
tgccaaaaacttactcgatgtcatt

SEQ ID NO: 274834 - DNA, 25 bp, probe
tgccataaatttcttcatcgacatt

SEQ ID NO: 274835 - DNA, 25 bp, probe
tcctactattccgtctacgacttgg

SEQ ID NO: 274836 - DNA, 25 bp, probe
tcctcactaatgcacttgactagtc

SEQ ID NO: 274837 - DNA, 25 bp, probe
tgcctcagcccaggattctttattc

SEQ ID NO: 274838 - DNA, 25 bp, probe
tgcctcaggccagctgtttcatggc

SEQ ID NO: 274839 - DNA, 25 bp, probe
tgccttcgaatagtgctgtccatag

SEQ ID NO: 274840 - DNA, 25 bp, probe
tgcctcaagctatgtgagctcacca

SEQ ID NO: 274841 - DNA, 25 bp, probe
tcctcggctgaactagccacatttc

SEQ ID NO: 274842 - DNA, 25 bp, probe
tccccccaaaactgattacaactgc

SEQ ID NO: 274843 - DNA, 25 bp, probe
tccccctaaaaagctgactcactgt

SEQ ID NO: 274844 - DNA, 25 bp, probe
tccacccaaaaaaacagactccagg

SEQ ID NO: 274845 - DNA, 25 bp, probe
tccacccaaaaaaacagactccagg

SEQ ID NO: 274846 - DNA, 25 bp, probe
tccacggatccagaaacaagcccac

SEQ ID NO: 274847 - DNA, 25 bp, probe
tccactggaaagaagggacacccac

SEQ ID NO: 274848 - DNA, 25 bp, probe
tccactggaaagaagggacacccac

SEQ ID NO: 274849 - DNA, 25 bp, probe
tccaaaggccagcggtgaccagcct

SEQ ID NO: 274850 - DNA, 25 bp, probe
tccacacagggcctggtgttctacc

SEQ ID NO: 274851 - DNA, 25 bp, probe
tccaaatgaggcctctatttttaca

SEQ ID NO: 274852 - DNA, 25 bp, probe
tccaaaagtggcctctttgtctaaa

SEQ ID NO: 274853 - DNA, 25 bp, probe
tccaaacagctgggtttaaatataa

SEQ ID NO: 274854 - DNA, 25 bp, probe
tccaccagcagcgaggaattaaccc

SEQ ID NO: 274855 - DNA, 25 bp, probe
tccaaccagacacgaattgtttgcc

SEQ ID NO: 274856 - DNA, 25 bp, probe
tgccaaacagccccagatggtgttc

SEQ ID NO: 274857 - DNA, 25 bp, probe
tccaaaatggccgtgcaagcttagg

SEQ ID NO: 274858 - DNA, 25 bp, probe
tccaaaagggcttcaatgcgaagga

SEQ ID NO: 274859 - DNA, 25 bp, probe
taataaggaccctaaggaacgattg

SEQ ID NO: 274860 - DNA, 25 bp, probe
taacaaggaccctaagaaacgactg

SEQ ID NO: 274861 - DNA, 25 bp, probe
tcaacaaggactttcaaaacgcgtt

SEQ ID NO: 274862 - DNA, 25 bp, probe
tccctcgaactctcgagaaccctgt

SEQ ID NO: 274863 - DNA, 25 bp, probe
tccctcgaactctcgagaaccctgt

SEQ ID NO: 274864 - DNA, 25 bp, probe
tgcctctggacagcatggggaaccc

SEQ ID NO: 274865 - DNA, 25 bp, probe
tgccctggtgctgcgggtgcagcac

SEQ ID NO: 274866 - DNA, 25 bp, probe
tgcccctgtgctgccagggagaaga

SEQ ID NO: 274867 - DNA, 25 bp, probe
tgcctctacttgggagcgggaagag

SEQ ID NO: 274868 - DNA, 25 bp, probe
tgcctctacttgggagcgggaagag

SEQ ID NO: 274869 - DNA, 25 bp, probe
tgccgctgagagggggctgggaaaa

SEQ ID NO: 274870 - DNA, 25 bp, probe
tgcctctggagctgctggctgagga

SEQ ID NO: 274871 - DNA, 25 bp, probe
tccatcatgtcagagcaggtgaaga

SEQ ID NO: 274872 - DNA, 25 bp, probe
tccagcatggagcagacgagaagtc

SEQ ID NO: 274873 - DNA, 25 bp, probe
tccaccggggagggacagtctggag

SEQ ID NO: 274874 - DNA, 25 bp, probe
tccagccggggctgtaatgtctcca

SEQ ID NO: 274875 - DNA, 25 bp, probe
tgccagggtgggtgtccatgtgcac

SEQ ID NO: 274876 - DNA, 25 bp, probe
tgcctgagtcgtgacctgctaggcc

SEQ ID NO: 274877 - DNA, 25 bp, probe
tgcctgagtcgtgacctgctaggcc

SEQ ID NO: 274878 - DNA, 25 bp, probe
tgcctcaggactgcaccttagggca

SEQ ID NO: 274879 - DNA, 25 bp, probe
tgcccgagccttaccaagaggagca

SEQ ID NO: 274880 - DNA, 25 bp, probe
tccacaatgcctatgcccgtgaaga

SEQ ID NO: 274881 - DNA, 25 bp, probe
tccacaatgcctatgcccgtgaaga

SEQ ID NO: 274882 - DNA, 25 bp, probe
tctgagaatgacgatacccgtgact

SEQ ID NO: 274883 - DNA, 25 bp, probe
tccagcagcagctaaacaccgttct

SEQ ID NO: 274884 - DNA, 25 bp, probe
tgccatgacgacacagtgccgtagc

SEQ ID NO: 274885 - DNA, 25 bp, probe
tgccatgacgacacagtgccgtagc

SEQ ID NO: 274886 - DNA, 25 bp, probe
tgccaagcagaaacacgggctacac

SEQ ID NO: 274887 - DNA, 25 bp, probe
tgccaacatgcagaattgtgagcta

SEQ ID NO: 274888 - DNA, 25 bp, probe
tccaacaaccgctttgtgcataagg

SEQ ID NO: 274889 - DNA, 25 bp, probe
tccagaagaatcccttctagaaagc

SEQ ID NO: 274890 - DNA, 25 bp, probe
tgcctggaggaccctccttacagac

SEQ ID NO: 274891 - DNA, 25 bp, probe
tgcctggaggaccctccttacagac

SEQ ID NO: 274892 - DNA, 25 bp, probe
tgccttagtgtccttcttaacagac

SEQ ID NO: 274893 - DNA, 25 bp, probe
tgcctttattgcctctgtcttaaag

SEQ ID NO: 274894 - DNA, 25 bp, probe
tgcctgttaatattcatgttctgaa

SEQ ID NO: 274895 - DNA, 25 bp, probe
tgccttctatgaaagcagtcattat

SEQ ID NO: 274896 - DNA, 25 bp, probe
tgcctcctagtatcgatgcagttta

SEQ ID NO: 274897 - DNA, 25 bp, probe
tgcctcccaggttcaagcaattctc

SEQ ID NO: 274898 - DNA, 25 bp, probe
tgccccctgactgatagcatttcag

SEQ ID NO: 274899 - DNA, 25 bp, probe
tgccgctcgcggtgatgtttgtagc

SEQ ID NO: 274900 - DNA, 25 bp, probe
tgccgctcgcggtgatgtttgtagc

SEQ ID NO: 274901 - DNA, 25 bp, probe
tgcccccctgaaatgtttgacatca

SEQ ID NO: 274902 - DNA, 25 bp, probe
tgcctcccctgtctgtaaggagcag

SEQ ID NO: 274903 - DNA, 25 bp, probe
tgccatgccgcccgaatataaaggg

SEQ ID NO: 274904 - DNA, 25 bp, probe
tgccggctgcgctgtgaaaaggagg

SEQ ID NO: 274905 - DNA, 25 bp, probe
tgcccctgcctgggacagaaatgtg

SEQ ID NO: 274906 - DNA, 25 bp, probe
tgccaccactagagacacagacagt

SEQ ID NO: 274907 - DNA, 25 bp, probe
tgccaccactgggcaaacagaagaa

SEQ ID NO: 274908 - DNA, 25 bp, probe
tgcctgccaaatggaaccagaggaa

SEQ ID NO: 274909 - DNA, 25 bp, probe
tgcctgccaaatggaaccagaggaa

SEQ ID NO: 274910 - DNA, 25 bp, probe
tgcctgcctgtctgcaacaaggaca

SEQ ID NO: 274911 - DNA, 25 bp, probe
tgcctctcttgctgaaccaatagca

SEQ ID NO: 274912 - DNA, 25 bp, probe
tgccttcttggggattcaaaaacag

SEQ ID NO: 274913 - DNA, 25 bp, probe
tcctttgtggggtgcacagctcaac

SEQ ID NO: 274914 - DNA, 25 bp, probe
tcctttgtggggtgcacagctcaac

SEQ ID NO: 274915 - DNA, 25 bp, probe
tgcctctctgtgtcaggggacagct

SEQ ID NO: 274916 - DNA, 25 bp, probe
tgccaaatatgccaaggtgaagctt

SEQ ID NO: 274917 - DNA, 25 bp, probe
tgccaccaatgccaggaaacatctt

SEQ ID NO: 274918 - DNA, 25 bp, probe
tgcctaaatggagtataccttgtaa

SEQ ID NO: 274919 - DNA, 25 bp, probe
tgcctagactttgcattccttgttc

SEQ ID NO: 274920 - DNA, 25 bp, probe
tgcctgacacttggatttacttctt

SEQ ID NO: 274921 - DNA, 25 bp, probe
tgcctaacacatgcggtcacttttg

SEQ ID NO: 274922 - DNA, 25 bp, probe
tcctaagaccctgttatttgtgtta

SEQ ID NO: 274923 - DNA, 25 bp, probe
tccaagaaccctggttgcttgctct

SEQ ID NO: 274924 - DNA, 25 bp, probe
tccaagaacatccgagtttcttctc

SEQ ID NO: 274925 - DNA, 25 bp, probe
tccagaaacacaaatcttcctcctc

SEQ ID NO: 274926 - DNA, 25 bp, probe
tccgaggaaaatcactcctacacgc

SEQ ID NO: 274927 - DNA, 25 bp, probe
tgcctgggaagaattcacccctacc

SEQ ID NO: 274928 - DNA, 25 bp, probe
tgcctgggaagaattcacccctacc

SEQ ID NO: 274929 - DNA, 25 bp, probe
tgcctgaggaagaaccccgcagagc

SEQ ID NO: 274930 - DNA, 25 bp, probe
tgccgtgaaagatgtcccaggatcc

SEQ ID NO: 274931 - DNA, 25 bp, probe
tccagcttcaagaggcgtaggtcct

SEQ ID NO: 274932 - DNA, 25 bp, probe
tccagctccaagagtgccgggaggt

SEQ ID NO: 274933 - DNA, 25 bp, probe
tgcctggccacaatggtgcttggga

SEQ ID NO: 274934 - DNA, 25 bp, probe
tgcctggccacaatggtgcttggga

SEQ ID NO: 274935 - DNA, 25 bp, probe
tgcctggccacagtggtgcttggga

SEQ ID NO: 274936 - DNA, 25 bp, probe
tgccagcgacacctggatgttcggg

SEQ ID NO: 274937 - DNA, 25 bp, probe
tgccgctacaaggacagcttcgcgg

SEQ ID NO: 274938 - DNA, 25 bp, probe
tgccgcacacaaacaatgcaaacgg

SEQ ID NO: 274939 - DNA, 25 bp, probe
tccagacccatgacaacagacagca

SEQ ID NO: 274940 - DNA, 25 bp, probe
tccacccaattccacgatgaacaga

SEQ ID NO: 274941 - DNA, 25 bp, probe
tgccacccatcaatctaactaacag

SEQ ID NO: 274942 - DNA, 25 bp, probe
tgccacccatcaatctaactaacag

SEQ ID NO: 274943 - DNA, 25 bp, probe
tgccactccatctggacatttaatg

SEQ ID NO: 274944 - DNA, 25 bp, probe
tgccacagccacggggtttgcaata

SEQ ID NO: 274945 - DNA, 25 bp, probe
tgccgagctcacggatgctgtgaag

SEQ ID NO: 274946 - DNA, 25 bp, probe
tgcctggcctacctgatgatgaaga

SEQ ID NO: 274947 - DNA, 25 bp, probe
tgccatgacctacagtgacatgcag

SEQ ID NO: 274948 - DNA, 25 bp, probe
tgcctgaccagggaccagcatgagc

SEQ ID NO: 274949 - DNA, 25 bp, probe
tgccttcacagtggacaatggactc

SEQ ID NO: 274950 - DNA, 25 bp, probe
tccctaatgtgccataaggcctcag

SEQ ID NO: 274951 - DNA, 25 bp, probe
tccctaatgtgccataaggcctcag

SEQ ID NO: 274952 - DNA, 25 bp, probe
tccaccacgtctgagaccattcagt

SEQ ID NO: 274953 - DNA, 25 bp, probe
tccaccacgtctgagaccattcagt

SEQ ID NO: 274954 - DNA, 25 bp, probe
tctgaaacctttaaccatgccaatg

SEQ ID NO: 274955 - DNA, 25 bp, probe
tccaaacttttgaatccataagatt

SEQ ID NO: 274956 - DNA, 25 bp, probe
tccaaatatgttagtacctaccctt

SEQ ID NO: 274957 - DNA, 25 bp, probe
tccaattgattctctacttttccct

SEQ ID NO: 274958 - DNA, 25 bp, probe
tgcctttgtatcttgtaccttttca

SEQ ID NO: 274959 - DNA, 25 bp, probe
tgcctttctgatcttgaatcttccc

SEQ ID NO: 274960 - DNA, 25 bp, probe
tgcctttctgatcttgaatcttccc

SEQ ID NO: 274961 - DNA, 25 bp, probe
tgccttcctgcgcattgacatgtat

SEQ ID NO: 274962 - DNA, 25 bp, probe
tgcctttccccagacagttagaatg

SEQ ID NO: 274963 - DNA, 25 bp, probe
tctctttccctacaactaggtcagc

SEQ ID NO: 274964 - DNA, 25 bp, probe
tccagtcccctggacaatcgggtac

SEQ ID NO: 274965 - DNA, 25 bp, probe
tgccactcacgtatgccaatcttgg

SEQ ID NO: 274966 - DNA, 25 bp, probe
tgcctttcgtgaacacattcttggt

SEQ ID NO: 274967 - DNA, 25 bp, probe
tgccttgtttatagccacttgtgag

SEQ ID NO: 274968 - DNA, 25 bp, probe
tgcctacctcttagacatgttgtga

SEQ ID NO: 274969 - DNA, 25 bp, probe
tgccgacgctcttaatctgattgag

SEQ ID NO: 274970 - DNA, 25 bp, probe
tccagacgcgttaagcgcattggtc

SEQ ID NO: 274971 - DNA, 25 bp, probe
tccaaacgtctatgctgctttgttc

SEQ ID NO: 274972 - DNA, 25 bp, probe
tccaagcggatgaagggtttttgtt

SEQ ID NO: 274973 - DNA, 25 bp, probe
tccacagagccgagggttcacgatg

SEQ ID NO: 274974 - DNA, 25 bp, probe
tccacagagccgagggttcacgatg

SEQ ID NO: 274975 - DNA, 25 bp, probe
tccaagtgccagaggtgggcaggtg

SEQ ID NO: 274976 - DNA, 25 bp, probe
tgccaatgaggctcggtggggggct

SEQ ID NO: 274977 - DNA, 25 bp, probe
tgccaatcaacatgctggtgaaggt

SEQ ID NO: 274978 - DNA, 25 bp, probe
tgccttcagatccctcgatagagga

SEQ ID NO: 274979 - DNA, 25 bp, probe
tgccttcagatccctcgatagagga

SEQ ID NO: 274980 - DNA, 25 bp, probe
tgccatatggatctctctacaatgt

SEQ ID NO: 274981 - DNA, 25 bp, probe
tgcctgaggctgctttactctggaa

SEQ ID NO: 274982 - DNA, 25 bp, probe
tgccatatttgacttggcttctggt

SEQ ID NO: 274983 - DNA, 25 bp, probe
tgccatattcaatctggtctattgg

SEQ ID NO: 274984 - DNA, 25 bp, probe
tgcctactgtatgcatgagttgagt

SEQ ID NO: 274985 - DNA, 25 bp, probe
tgccttctgctcagctgatgatgga

SEQ ID NO: 274986 - DNA, 25 bp, probe
tgcctgctctgggccatgcagagga

SEQ ID NO: 274987 - DNA, 25 bp, probe
tgcctgtgtggcacaatggagaaaa

SEQ ID NO: 274988 - DNA, 25 bp, probe
tgccatgttacttgagaaagaaact

SEQ ID NO: 274989 - DNA, 25 bp, probe
tgccagatttcttgagcatgaatgg

SEQ ID NO: 274990 - DNA, 25 bp, probe
tgccttgcttctaccatgagcagag

SEQ ID NO: 274991 - DNA, 25 bp, probe
tgccgtgttcaggctcatggagcag

SEQ ID NO: 274992 - DNA, 25 bp, probe
tccaagcaaagccatatggagcatc

SEQ ID NO: 274993 - DNA, 25 bp, probe
tgcctccagagagcatcatgtacag

SEQ ID NO: 274994 - DNA, 25 bp, probe
tgcctagcgataacattgattcaca

SEQ ID NO: 274995 - DNA, 25 bp, probe
tgccatggtaatcctgctcagtacg

SEQ ID NO: 274996 - DNA, 25 bp, probe
tgccatgctgcgttttgtggtaatg

SEQ ID NO: 274997 - DNA, 25 bp, probe
tgcctgtccaatactgggttcagct

SEQ ID NO: 274998 - DNA, 25 bp, probe
tgccagttatcattcgtgtgactac

SEQ ID NO: 274999 - DNA, 25 bp, probe
tgccagtcttgcaatcaggtcagaa

SEQ ID NO: 275000 - DNA, 25 bp, probe
tgccatgggatgcagcatttatgaa

SEQ ID NO: 275001 - DNA, 25 bp, probe
tgccatgggatgcagcatttatgaa

SEQ ID NO: 275002 - DNA, 25 bp, probe
tgccatggtgctggagctccttggc

SEQ ID NO: 275003 - DNA, 25 bp, probe
tcgttggtcacacccatggtgaatc

SEQ ID NO: 275004 - DNA, 25 bp, probe
tgccttcccaacactgaggacatca

SEQ ID NO: 275005 - DNA, 25 bp, probe
tgcctcttctaaaagctactgagct

SEQ ID NO: 275006 - DNA, 25 bp, probe
tgcctgtctccatgaggtactggtc

SEQ ID NO: 275007 - DNA, 25 bp, probe
tgcctgctgtgcaaggaggcttgct

SEQ ID NO: 275008 - DNA, 25 bp, probe
tgcctggatgcggtggtgcattgtg

SEQ ID NO: 275009 - DNA, 25 bp, probe
tgcctggagcggggctgacagcagg

SEQ ID NO: 275010 - DNA, 25 bp, probe
tgcctggagcggggctgacagcagg

SEQ ID NO: 275011 - DNA, 25 bp, probe
tccttagctgcggtgctatatgcca

SEQ ID NO: 275012 - DNA, 25 bp, probe
tgccttcgtggtactcatggctcac

SEQ ID NO: 275013 - DNA, 25 bp, probe
tgccttcttggtattgtaccccaaa

SEQ ID NO: 275014 - DNA, 25 bp, probe
tgccttcttggtattgtaccccaaa

SEQ ID NO: 275015 - DNA, 25 bp, probe
tgcctgttctggaagtgttatcacc

SEQ ID NO: 275016 - DNA, 25 bp, probe
tgcctttcttgaagtgttctctgcc

SEQ ID NO: 275017 - DNA, 25 bp, probe
tctagttcttaagttgttagccaag

SEQ ID NO: 275018 - DNA, 25 bp, probe
tccagcttttgatcttggggccaga

SEQ ID NO: 275019 - DNA, 25 bp, probe
tccttttggacgcagaaggccacat

SEQ ID NO: 275020 - DNA, 25 bp, probe
tgcctttgtcggggagaagttcaga

SEQ ID NO: 275021 - DNA, 25 bp, probe
tgcctttgtaggggtcaagttccgg

SEQ ID NO: 275022 - DNA, 25 bp, probe
tcccctgttggggctaaggaaggag

SEQ ID NO: 275023 - DNA, 25 bp, probe
tcccctttagggaaggagtcaacag

SEQ ID NO: 275024 - DNA, 25 bp, probe
tcctcacctggagggttggacccac

SEQ ID NO: 275025 - DNA, 25 bp, probe
tccacaccagtggagtcttcgagac

SEQ ID NO: 275026 - DNA, 25 bp, probe
tccaagctgcatggcaagttctgtg

SEQ ID NO: 275027 - DNA, 25 bp, probe
tccaccagatcgacttgatcgtgca

SEQ ID NO: 275028 - DNA, 25 bp, probe
tccaccagatcgacttgatcgtgca

SEQ ID NO: 275029 - DNA, 25 bp, probe
tccaccagatcgacttgatcgtgca

SEQ ID NO: 275030 - DNA, 25 bp, probe
tccactgaatcgctggactgtgaag

SEQ ID NO: 275031 - DNA, 25 bp, probe
tccacgtattggtcaacttcagggt

SEQ ID NO: 275032 - DNA, 25 bp, probe
tccaggttgatatcacctacacgga

SEQ ID NO: 275033 - DNA, 25 bp, probe
tctcggcattaatccgtttatgtga

SEQ ID NO: 275034 - DNA, 25 bp, probe
tccaatgttgaatccctttatctac

SEQ ID NO: 275035 - DNA, 25 bp, probe
tccaggagctaatctgaccgttcta

SEQ ID NO: 275036 - DNA, 25 bp, probe
tccaggagctaatctgaccgttcta

SEQ ID NO: 275037 - DNA, 25 bp, probe
tccataggtagctttacgtgtggct

SEQ ID NO: 275038 - DNA, 25 bp, probe
tccataggtagctttacgtgtggct

SEQ ID NO: 275039 - DNA, 25 bp, probe
tccaagaggcatccataccctgggt

SEQ ID NO: 275040 - DNA, 25 bp, probe
tccagagggccatatcccgaaacct

SEQ ID NO: 275041 - DNA, 25 bp, probe
tcgaggaagccatacccaagtcctt

SEQ ID NO: 275042 - DNA, 25 bp, probe
tcgaggaagccatacccaagtcctt

SEQ ID NO: 275043 - DNA, 25 bp, probe
tccaggacgccagaaccagcagtcc

SEQ ID NO: 275044 - DNA, 25 bp, probe
tgccatccccgataacctggatgcc

SEQ ID NO: 275045 - DNA, 25 bp, probe
tccaacctctgaaaaccatcgatga

SEQ ID NO: 275046 - DNA, 25 bp, probe
tccacacggacatcaagcccgagaa

SEQ ID NO: 275047 - DNA, 25 bp, probe
tgccacaaacactgcagagaccagg

SEQ ID NO: 275048 - DNA, 25 bp, probe
tgccactgaacagctatgaacgagg

SEQ ID NO: 275049 - DNA, 25 bp, probe
tgccacgactattcttggacttggg

SEQ ID NO: 275050 - DNA, 25 bp, probe
tgccaccgtcattgtctgtgactgc

SEQ ID NO: 275051 - DNA, 25 bp, probe
tgccatcactggtgttgtcacctcc

SEQ ID NO: 275052 - DNA, 25 bp, probe
tgccacgtggatcaggtctgttcct

SEQ ID NO: 275053 - DNA, 25 bp, probe
tgccaagcgaggcagcaggctcttc

SEQ ID NO: 275054 - DNA, 25 bp, probe
tgccaaggataaagctggctgcttc

SEQ ID NO: 275055 - DNA, 25 bp, probe
tgccagatggaagtgctcgatcgct

SEQ ID NO: 275056 - DNA, 25 bp, probe
tgccaatatgcaactgatcccgctt

SEQ ID NO: 275057 - DNA, 25 bp, probe
tgccaatagtcagttcaccagcacc

SEQ ID NO: 275058 - DNA, 25 bp, probe
tgccaataacattcttcgatctctg

SEQ ID NO: 275059 - DNA, 25 bp, probe
tgccaataacattcttcgatctctg

SEQ ID NO: 275060 - DNA, 25 bp, probe
tgccaggaggcatctgttgatttct

SEQ ID NO: 275061 - DNA, 25 bp, probe
tgccagcaaagcactgtgggtcttg

SEQ ID NO: 275062 - DNA, 25 bp, probe
tgccagcaaagcactgtgggtcttg

SEQ ID NO: 275063 - DNA, 25 bp, probe
tgccaagacagtgctggtgtttgtg

SEQ ID NO: 275064 - DNA, 25 bp, probe
tgccaagacagtgctggtgtttgtg

SEQ ID NO: 275065 - DNA, 25 bp, probe
tgccaactattttgaggatgttgag

SEQ ID NO: 275066 - DNA, 25 bp, probe
tgccaactattttgaggatgttgag

SEQ ID NO: 275067 - DNA, 25 bp, probe
tgccaactacatccggggctatggt

SEQ ID NO: 275068 - DNA, 25 bp, probe
tgccaactacatccggggctatggt

SEQ ID NO: 275069 - DNA, 25 bp, probe
tgccaatgtgaccctgggactctgg

SEQ ID NO: 275070 - DNA, 25 bp, probe
tgccacatctgaccttggataccat

SEQ ID NO: 275071 - DNA, 25 bp, probe
tgccatcctcacagctgaaatctca

SEQ ID NO: 275072 - DNA, 25 bp, probe
tgccatgtccacagtatctgccata

SEQ ID NO: 275073 - DNA, 25 bp, probe
tgcctacggcatagttctgacattg

SEQ ID NO: 275074 - DNA, 25 bp, probe
tgcctacggcatagttctgacattg

SEQ ID NO: 275075 - DNA, 25 bp, probe
tgcctatggagaagttcaacttgct

SEQ ID NO: 275076 - DNA, 25 bp, probe
tgcctgtggagaggtaaagctggct

SEQ ID NO: 275077 - DNA, 25 bp, probe
tgcctggggagggagagcgtggatc

SEQ ID NO: 275078 - DNA, 25 bp, probe
tgcctggggagggagagcgtggatc

SEQ ID NO: 275079 - DNA, 25 bp, probe
tgccagggaagggggtgctgcagcc

SEQ ID NO: 275080 - DNA, 25 bp, probe
tccaaggaaggcagcaggcgcgcaa

SEQ ID NO: 275081 - DNA, 25 bp, probe
tccaaggggtctgatttgctgagac

SEQ ID NO: 275082 - DNA, 25 bp, probe
tccaagtggagtcccttcattcaga

SEQ ID NO: 275083 - DNA, 25 bp, probe
tgccaagaggaacgacttctgtaag

SEQ ID NO: 275084 - DNA, 25 bp, probe
tgccaaggcagaacccattcttggg

SEQ ID NO: 275085 - DNA, 25 bp, probe
tgccaaggcagaacccattcttggg

SEQ ID NO: 275086 - DNA, 25 bp, probe
tgccaggacagagccctgctggtga

SEQ ID NO: 275087 - DNA, 25 bp, probe
tgccaggacagagccctgctggtga

SEQ ID NO: 275088 - DNA, 25 bp, probe
tgccaggaccagtcccagagcagga

SEQ ID NO: 275089 - DNA, 25 bp, probe
tcgaagatgccgacctcagcatcgg

SEQ ID NO: 275090 - DNA, 25 bp, probe
tccaagcatgtggccattacacagg

SEQ ID NO: 275091 - DNA, 25 bp, probe
tccaatgatgcttactacagaaagc

SEQ ID NO: 275092 - DNA, 25 bp, probe
tccaagagtaagttctgctacctcc

SEQ ID NO: 275093 - DNA, 25 bp, probe
tccaacttataatatctcccatccc

SEQ ID NO: 275094 - DNA, 25 bp, probe
tccaactctgaatcttttttcaccg

SEQ ID NO: 275095 - DNA, 25 bp, probe
tccaactctgaatcttttttcaccg

SEQ ID NO: 275096 - DNA, 25 bp, probe
tgccacaccttatccagttagacac

SEQ ID NO: 275097 - DNA, 25 bp, probe
tgcctactatctacccaacaagaac

SEQ ID NO: 275098 - DNA, 25 bp, probe
tgcctttgatcattcaccaaacaaa

SEQ ID NO: 275099 - DNA, 25 bp, probe
tgccttttctgacctcatataacac

SEQ ID NO: 275100 - DNA, 25 bp, probe
tgccttttcacatcaccaagacagc

SEQ ID NO: 275101 - DNA, 25 bp, probe
tgccttttcacatcaccaagacagc

SEQ ID NO: 275102 - DNA, 25 bp, probe
tgcctttccattacctagcagaacc

SEQ ID NO: 275103 - DNA, 25 bp, probe
tccagatttttcactagcgtacatc

SEQ ID NO: 275104 - DNA, 25 bp, probe
tccaagtgcttatccaactctgaat

SEQ ID NO: 275105 - DNA, 25 bp, probe
tccaagtgcttatccaactctgaat

SEQ ID NO: 275106 - DNA, 25 bp, probe
tccaggtttcattcctaataaaggc

SEQ ID NO: 275107 - DNA, 25 bp, probe
tccaggttttacatcccagagggct

SEQ ID NO: 275108 - DNA, 25 bp, probe
tccaaaatccttgtccaaggaggct

SEQ ID NO: 275109 - DNA, 25 bp, probe
tgccacaacatggctttttcctgtg

SEQ ID NO: 275110 - DNA, 25 bp, probe
tccactacatggtgtttgccgtgtt

SEQ ID NO: 275111 - DNA, 25 bp, probe
tccactacatggtgtttgccgtgtt

SEQ ID NO: 275112 - DNA, 25 bp, probe
tgccactagggctcttgtgtttttt

SEQ ID NO: 275113 - DNA, 25 bp, probe
tccagtggggccatgattggtttct

SEQ ID NO: 275114 - DNA, 25 bp, probe
tccagtggtgccttacatggtgtgt

SEQ ID NO: 275115 - DNA, 25 bp, probe
tctgcaaagtggtcaaaagtgctgc

SEQ ID NO: 275116 - DNA, 25 bp, probe
tgccagggtttcgagaagctgctct

SEQ ID NO: 275117 - DNA, 25 bp, probe
tgcctgcgggacagcaatgggcgca

SEQ ID NO: 275118 - DNA, 25 bp, probe
tgccagagggagggccatgggccga

SEQ ID NO: 275119 - DNA, 25 bp, probe
tgccagagggagggccatgggccga

SEQ ID NO: 275120 - DNA, 25 bp, probe
tgccagcaggaagccctgcaaccag

SEQ ID NO: 275121 - DNA, 25 bp, probe
tccagcagtgaacactgtccgccgc

SEQ ID NO: 275122 - DNA, 25 bp, probe
tccagcgatgtacgcactgtcagtt

SEQ ID NO: 275123 - DNA, 25 bp, probe
tgccatgccaggaacctgtcctaag

SEQ ID NO: 275124 - DNA, 25 bp, probe
tgcctcctggaaccagatcctggac

SEQ ID NO: 275125 - DNA, 25 bp, probe
tccaacaggatcacagacctgggcc

SEQ ID NO: 275126 - DNA, 25 bp, probe
tccacaagcagattactgcacgggc

SEQ ID NO: 275127 - DNA, 25 bp, probe
tgccacagtttctactccagggcag

SEQ ID NO: 275128 - DNA, 25 bp, probe
tgccacagtggatacgccagcaggc

SEQ ID NO: 275129 - DNA, 25 bp, probe
tgccacagtggatacgccagcaggc

SEQ ID NO: 275130 - DNA, 25 bp, probe
tgccatgctggaaaccagcccaggc

SEQ ID NO: 275131 - DNA, 25 bp, probe
tgccagcgaaaccaaaccatgcctg

SEQ ID NO: 275132 - DNA, 25 bp, probe
tgccagcgaaaccaaaccatgcctg

SEQ ID NO: 275133 - DNA, 25 bp, probe
tgccagaaacaggctgaacagccct

SEQ ID NO: 275134 - DNA, 25 bp, probe
tgccagaggagctcgacatctccca

SEQ ID NO: 275135 - DNA, 25 bp, probe
tccagctggacttcgatgacttcct

SEQ ID NO: 275136 - DNA, 25 bp, probe
tccagctggacttcgatgacttcct

SEQ ID NO: 275137 - DNA, 25 bp, probe
tccagcaagacttcgtgatttttaa

SEQ ID NO: 275138 - DNA, 25 bp, probe
tccaccaagtcccagtttagtcaga

SEQ ID NO: 275139 - DNA, 25 bp, probe
tccaccaagtcccagtttagtcaga

SEQ ID NO: 275140 - DNA, 25 bp, probe
tccctaaaacccatctgatgtctga

SEQ ID NO: 275141 - DNA, 25 bp, probe
tccactatgacatctaagttttgtg

SEQ ID NO: 275142 - DNA, 25 bp, probe
tccacgtcactcacaagtttctgtt

SEQ ID NO: 275143 - DNA, 25 bp, probe
tccaaggactctcatgcacttatcg

SEQ ID NO: 275144 - DNA, 25 bp, probe
tccaagtatcctcagcacagaaagc

SEQ ID NO: 275145 - DNA, 25 bp, probe
tccaagtatcctcagcacagaaagc

SEQ ID NO: 275146 - DNA, 25 bp, probe
tccacagttacacggaaagcatggt

SEQ ID NO: 275147 - DNA, 25 bp, probe
tccacactaggcaggaatatgaggt

SEQ ID NO: 275148 - DNA, 25 bp, probe
tcctcaccaccgagacagttggttt

SEQ ID NO: 275149 - DNA, 25 bp, probe
tcctgcaaacggagacctcggtcat

SEQ ID NO: 275150 - DNA, 25 bp, probe
tcctgcaaacggagacctcggtcat

SEQ ID NO: 275151 - DNA, 25 bp, probe
tccagtaagttcataccaggggtcc

SEQ ID NO: 275152 - DNA, 25 bp, probe
tccagtaagttcataccaggggtcc

SEQ ID NO: 275153 - DNA, 25 bp, probe
tccaggaactggggaacacaaggtc

SEQ ID NO: 275154 - DNA, 25 bp, probe
tcgggagaggggattcacaaggtga

SEQ ID NO: 275155 - DNA, 25 bp, probe
tacacaaaggggatcataaagttag

SEQ ID NO: 275156 - DNA, 25 bp, probe
tcaaaactcggtgatcatagttgat

SEQ ID NO: 275157 - DNA, 25 bp, probe
tccagaccgcggcctaataatgagt

SEQ ID NO: 275158 - DNA, 25 bp, probe
tgccaacccggagactgaagtgtca

SEQ ID NO: 275159 - DNA, 25 bp, probe
tgccagaccacgcaaagctacaggc

SEQ ID NO: 275160 - DNA, 25 bp, probe
tccaagaatttaactatcgcaccat

SEQ ID NO: 275161 - DNA, 25 bp, probe
tccgagttttcacttacctcattgg

SEQ ID NO: 275162 - DNA, 25 bp, probe
tgccaaggtgaagcttatcccactg

SEQ ID NO: 275163 - DNA, 25 bp, probe
tccaagggatctgcttgatatccca

SEQ ID NO: 275164 - DNA, 25 bp, probe
tgccattgaagattactttcatcaa

SEQ ID NO: 275165 - DNA, 25 bp, probe
tgccaggatggacatcttgtgtaat

SEQ ID NO: 275166 - DNA, 25 bp, probe
tgccaggataacgaattggaaaaga

SEQ ID NO: 275167 - DNA, 25 bp, probe
tccagagtacccagctattaataga

SEQ ID NO: 275168 - DNA, 25 bp, probe
tccaagggccacatgcgagtattaa

SEQ ID NO: 275169 - DNA, 25 bp, probe
tccaaacaaacactggagatcaaaa

SEQ ID NO: 275170 - DNA, 25 bp, probe
tgccttacacaaaggggatcataaa

SEQ ID NO: 275171 - DNA, 25 bp, probe
tgcctttgcaatcctagggtttgac

SEQ ID NO: 275172 - DNA, 25 bp, probe
tgcctttaactctagggacctgcct

SEQ ID NO: 275173 - DNA, 25 bp, probe
tgccatattacgacttagtgccctc

SEQ ID NO: 275174 - DNA, 25 bp, probe
tccatttacggtttgggaatccagg

SEQ ID NO: 275175 - DNA, 25 bp, probe
tcctttccctggaagaggaatccag

SEQ ID NO: 275176 - DNA, 25 bp, probe
tgccttccacgcaaataagaaacca

SEQ ID NO: 275177 - DNA, 25 bp, probe
tgccttgccacattaaattgataac

SEQ ID NO: 275178 - DNA, 25 bp, probe
tgccaggaactgtgtcattgatgac

SEQ ID NO: 275179 - DNA, 25 bp, probe
tccagaaacatatgggctgataaac

SEQ ID NO: 275180 - DNA, 25 bp, probe
tccagactgtcaaaatgttaagaac

SEQ ID NO: 275181 - DNA, 25 bp, probe
tccaattccaaggagttctcagaac

SEQ ID NO: 275182 - DNA, 25 bp, probe
tgcctttgctaagggaaccaaagcc

SEQ ID NO: 275183 - DNA, 25 bp, probe
tctcctttaaggacaactcctacct

SEQ ID NO: 275184 - DNA, 25 bp, probe
tccttttgaagaccataacccacca

SEQ ID NO: 275185 - DNA, 25 bp, probe
tccgtttatcaggacacgggcccca

SEQ ID NO: 275186 - DNA, 25 bp, probe
tgccacccttcagtacatcgtgggc

SEQ ID NO: 275187 - DNA, 25 bp, probe
tgccacccggagtgcatacatggag

SEQ ID NO: 275188 - DNA, 25 bp, probe
tccagacctggatcagattcggaca

SEQ ID NO: 275189 - DNA, 25 bp, probe
tccaatccaaaactgtctcagaacc

SEQ ID NO: 275190 - DNA, 25 bp, probe
tccacaatcaacagtagcgccaacc

SEQ ID NO: 275191 - DNA, 25 bp, probe
tgccacattccagtgggacggccac

SEQ ID NO: 275192 - DNA, 25 bp, probe
tgccacagcccaggtcggagtggcc

SEQ ID NO: 275193 - DNA, 25 bp, probe
tgccacagcccaggtcggagtggcc

SEQ ID NO: 275194 - DNA, 25 bp, probe
tgccaagtgcccctgtgggatggga

SEQ ID NO: 275195 - DNA, 25 bp, probe
tccacagcgtatgtggggaggtgga

SEQ ID NO: 275196 - DNA, 25 bp, probe
tccaccgccatggcttccaaggtgg

SEQ ID NO: 275197 - DNA, 25 bp, probe
tccaccgccatggcttccaaggtgg

SEQ ID NO: 275198 - DNA, 25 bp, probe
tccccccaggttagcaattgggaat

SEQ ID NO: 275199 - DNA, 25 bp, probe
tccactcccgaatttactgaggaaa

SEQ ID NO: 275200 - DNA, 25 bp, probe
tccacccccaagttgatctgagtat

SEQ ID NO: 275201 - DNA, 25 bp, probe
tccacacgcctaacaggacgtatta

SEQ ID NO: 275202 - DNA, 25 bp, probe
tccacactgccggcaggatgcagcg

SEQ ID NO: 275203 - DNA, 25 bp, probe
tccacactgccacaatgcaggtgta

SEQ ID NO: 275204 - DNA, 25 bp, probe
tgccattctccaaagctgctgatgt

SEQ ID NO: 275205 - DNA, 25 bp, probe
tgccattgccaacagctgcatgaac

SEQ ID NO: 275206 - DNA, 25 bp, probe
tccatgatgctaccagagtctacct

SEQ ID NO: 275207 - DNA, 25 bp, probe
tccagatctcagtaaggtacggagt

SEQ ID NO: 275208 - DNA, 25 bp, probe
tccagtccactgaaacaccctgagt

SEQ ID NO: 275209 - DNA, 25 bp, probe
tccagtgccgggtcaccaccgagga

SEQ ID NO: 275210 - DNA, 25 bp, probe
tgccaaaggggttcccctgcggagt

SEQ ID NO: 275211 - DNA, 25 bp, probe
tccaaagtgggaattccctcggaag

SEQ ID NO: 275212 - DNA, 25 bp, probe
tccaaagtgggaattccctcggaag

SEQ ID NO: 275213 - DNA, 25 bp, probe
tccaaagggtgcagccccttttgaa

SEQ ID NO: 275214 - DNA, 25 bp, probe
tccaaaggaggccctgcccctttgg

SEQ ID NO: 275215 - DNA, 25 bp, probe
tccaatatgaatacccatcccctga

SEQ ID NO: 275216 - DNA, 25 bp, probe
tccgcaataattcaccagaccagaa

SEQ ID NO: 275217 - DNA, 25 bp, probe
tgccagccattaataaaaggacgat

SEQ ID NO: 275218 - DNA, 25 bp, probe
tccagccacatatcacaaacgacta

SEQ ID NO: 275219 - DNA, 25 bp, probe
tccagccactggcacgaagtgcctc

SEQ ID NO: 275220 - DNA, 25 bp, probe
tccaccacagtccctaagatgctgg

SEQ ID NO: 275221 - DNA, 25 bp, probe
tccacccctgtgaccaagaggagct

SEQ ID NO: 275222 - DNA, 25 bp, probe
tccactgagtccgctgaagggattt

SEQ ID NO: 275223 - DNA, 25 bp, probe
tgccacgactctctctgaatggagt

SEQ ID NO: 275224 - DNA, 25 bp, probe
tgccacagcagcgtcaggtaagaac

SEQ ID NO: 275225 - DNA, 25 bp, probe
tccacaaccacagggcagagagacg

SEQ ID NO: 275226 - DNA, 25 bp, probe
tccaagatggcaacgaggacatgaa

SEQ ID NO: 275227 - DNA, 25 bp, probe
tgccataatgctgctcgcaggaaat

SEQ ID NO: 275228 - DNA, 25 bp, probe
tgccatgttcgacttcagcgagaag

SEQ ID NO: 275229 - DNA, 25 bp, probe
tgccttactggaatacgcagcggtg

SEQ ID NO: 275230 - DNA, 25 bp, probe
tgccttactggaatacgcagcggtg

SEQ ID NO: 275231 - DNA, 25 bp, probe
tgccttctcggatttcacactggct

SEQ ID NO: 275232 - DNA, 25 bp, probe
tgccttcttctcatattacggatat

SEQ ID NO: 275233 - DNA, 25 bp, probe
tgccttcttctcatattacggatat

SEQ ID NO: 275234 - DNA, 25 bp, probe
tccagtctttcgtactacatggtag

SEQ ID NO: 275235 - DNA, 25 bp, probe
tccagactttctgaatagatttttt

SEQ ID NO: 275236 - DNA, 25 bp, probe
tgccaaatttgcatcacatacattt

SEQ ID NO: 275237 - DNA, 25 bp, probe
tgccaatcttccatgcaataatttc

SEQ ID NO: 275238 - DNA, 25 bp, probe
tgccaatcttccatgcaataatttc

SEQ ID NO: 275239 - DNA, 25 bp, probe
tccaacacccgtacatcaatgtctg

SEQ ID NO: 275240 - DNA, 25 bp, probe
tccaacacccgtacatcaatgtctg

SEQ ID NO: 275241 - DNA, 25 bp, probe
tccaccacctctggaacaagattaa

SEQ ID NO: 275242 - DNA, 25 bp, probe
tccacctcacttgacaaggagatac

SEQ ID NO: 275243 - DNA, 25 bp, probe
tccaccatagccatcctgaagagaa

SEQ ID NO: 275244 - DNA, 25 bp, probe
tccaaggtgctgaatcttggaggag

SEQ ID NO: 275245 - DNA, 25 bp, probe
tccagcagtggctgatttgggggag

SEQ ID NO: 275246 - DNA, 25 bp, probe
tccagcacggctttggtaggggagt

SEQ ID NO: 275247 - DNA, 25 bp, probe
tccacacggtgtgggtgggcagggc

SEQ ID NO: 275248 - DNA, 25 bp, probe
tccaccgactgctgaggtgtggggc

SEQ ID NO: 275249 - DNA, 25 bp, probe
tccaccgagcggcgtgtaggagtgc

SEQ ID NO: 275250 - DNA, 25 bp, probe
tccaccgagcggcgtgtaagagtgc

SEQ ID NO: 275251 - DNA, 25 bp, probe
tctgcacttggacaggggaaaggat

SEQ ID NO: 275252 - DNA, 25 bp, probe
tccagctagtgtcagcagtgggata

SEQ ID NO: 275253 - DNA, 25 bp, probe
tccagctagtgtcagcagtgggata

SEQ ID NO: 275254 - DNA, 25 bp, probe
tccagcttggactcatgaaggatta

SEQ ID NO: 275255 - DNA, 25 bp, probe
tccagtatgggatgagaagttttat

SEQ ID NO: 275256 - DNA, 25 bp, probe
tccgcatcgaggaggacgtcgtggt

SEQ ID NO: 275257 - DNA, 25 bp, probe
tccagcacgggcacgaggccgtggt

SEQ ID NO: 275258 - DNA, 25 bp, probe
tccacagggacaacaccaccgtggc

SEQ ID NO: 275259 - DNA, 25 bp, probe
tccacgggcatcatcatgtaccgct

SEQ ID NO: 275260 - DNA, 25 bp, probe
tccacgggcatcatcatgtaccgct

SEQ ID NO: 275261 - DNA, 25 bp, probe
tccacgatgccaaggcagaacccat

SEQ ID NO: 275262 - DNA, 25 bp, probe
tccacgatgccaaggcagaacccat

SEQ ID NO: 275263 - DNA, 25 bp, probe
tccgcaatgcgaggccagaggacct

SEQ ID NO: 275264 - DNA, 25 bp, probe
tccaattcgtcagtgagagctgcac

SEQ ID NO: 275265 - DNA, 25 bp, probe
tgccattcattggcaggatgaggcc

SEQ ID NO: 275266 - DNA, 25 bp, probe
tgccagtgcagatctggagaggagc

SEQ ID NO: 275267 - DNA, 25 bp, probe
tgccactgaatggctagagggatac

SEQ ID NO: 275268 - DNA, 25 bp, probe
tgccacggagtgtagggagcacccc

SEQ ID NO: 275269 - DNA, 25 bp, probe
tgccagcgtgcaggaagggggcaag

SEQ ID NO: 275270 - DNA, 25 bp, probe
tgccaagtaagagtggtggcctatt

SEQ ID NO: 275271 - DNA, 25 bp, probe
tgccacagaaggctggtgggttttt

SEQ ID NO: 275272 - DNA, 25 bp, probe
tgccaaaagtggagcgaggatgatt

SEQ ID NO: 275273 - DNA, 25 bp, probe
tccagcaagatgggtcctgactcaa

SEQ ID NO: 275274 - DNA, 25 bp, probe
tccagcaagatgggtcctgactcaa

SEQ ID NO: 275275 - DNA, 25 bp, probe
tgccagaagatcgagcagtgtgact

SEQ ID NO: 275276 - DNA, 25 bp, probe
tgccagacagcactaggagccactg

SEQ ID NO: 275277 - DNA, 25 bp, probe
tgccagacagcactaggagccactg

SEQ ID NO: 275278 - DNA, 25 bp, probe
tccaaatcagataatagcccagcaa

SEQ ID NO: 275279 - DNA, 25 bp, probe
tccactatgcacacagactccaaga

SEQ ID NO: 275280 - DNA, 25 bp, probe
tgccaattcatctcagcaatcacaa

SEQ ID NO: 275281 - DNA, 25 bp, probe
tccagttcacaggcagcaaacctcc

SEQ ID NO: 275282 - DNA, 25 bp, probe
tccagttcacaggcagcaaacctcc

SEQ ID NO: 275283 - DNA, 25 bp, probe
tccatgcaacatgcatagcccaccc

SEQ ID NO: 275284 - DNA, 25 bp, probe
tccatgcaacatgcatagcccaccc

SEQ ID NO: 275285 - DNA, 25 bp, probe
taatcaaattacccacccaaggctt

SEQ ID NO: 275286 - DNA, 25 bp, probe
taatcctgactacgtcccaaaggtc

SEQ ID NO: 275287 - DNA, 25 bp, probe
tcccctgaaaggtcctatacaagtc

SEQ ID NO: 275288 - DNA, 25 bp, probe
tccccttgaacagcctcaagcaagg

SEQ ID NO: 275289 - DNA, 25 bp, probe
tccacccgagacaccatagtcattg

SEQ ID NO: 275290 - DNA, 25 bp, probe
tccacatcgtgagtcattttacttt

SEQ ID NO: 275291 - DNA, 25 bp, probe
tccaccgacacttttaactacgcca

SEQ ID NO: 275292 - DNA, 25 bp, probe
tccacctacttatttcagattcacc

SEQ ID NO: 275293 - DNA, 25 bp, probe
tccagctctactttatgtcctgaag

SEQ ID NO: 275294 - DNA, 25 bp, probe
tccagactactactcagattgccag

SEQ ID NO: 275295 - DNA, 25 bp, probe
tgccaaattctaccgtggaatgtcc

SEQ ID NO: 275296 - DNA, 25 bp, probe
tccaaatgtgctcccagtgctaggt

SEQ ID NO: 275297 - DNA, 25 bp, probe
tccacagctattcccagctgctgat

SEQ ID NO: 275298 - DNA, 25 bp, probe
tccaactattcaaaggctaaggttt

SEQ ID NO: 275299 - DNA, 25 bp, probe
tccatgaccactgtaggatacggtg

SEQ ID NO: 275300 - DNA, 25 bp, probe
tccatgaccactgtaggatacggtg

SEQ ID NO: 275301 - DNA, 25 bp, probe
tcctaaacagacaggctacggatgg

SEQ ID NO: 275302 - DNA, 25 bp, probe
tccacaacacccatccaaggaatgg

SEQ ID NO: 275303 - DNA, 25 bp, probe
tccacagaaacccccgagtgttgtg

SEQ ID NO: 275304 - DNA, 25 bp, probe
tccacgacatccggatccggtggtg

SEQ ID NO: 275305 - DNA, 25 bp, probe
tgccacttcccaggtaagcaggagg

SEQ ID NO: 275306 - DNA, 25 bp, probe
tgccacttcccaggtaagcaggagg

SEQ ID NO: 275307 - DNA, 25 bp, probe
tccaacagctcctggaactgcgacg

SEQ ID NO: 275308 - DNA, 25 bp, probe
tcctacttctatccgaactggacat

SEQ ID NO: 275309 - DNA, 25 bp, probe
tccagtttacatccagaaaggccat

SEQ ID NO: 275310 - DNA, 25 bp, probe
tccagttaacataggaattaccaga

SEQ ID NO: 275311 - DNA, 25 bp, probe
tccaggtcaactgggactgcaacct

SEQ ID NO: 275312 - DNA, 25 bp, probe
tccaagatcaggtcgcagacgaacc

SEQ ID NO: 275313 - DNA, 25 bp, probe
tgccaagtccggacatcctatgtcc

SEQ ID NO: 275314 - DNA, 25 bp, probe
tgccagatttcggcatttctttcca

SEQ ID NO: 275315 - DNA, 25 bp, probe
tgccagtttgccaacggcatcttcc

SEQ ID NO: 275316 - DNA, 25 bp, probe
tgccagtttgccaacggcatcttcc

SEQ ID NO: 275317 - DNA, 25 bp, probe
tgccagattcatccctaagcactgt

SEQ ID NO: 275318 - DNA, 25 bp, probe
tgccatcttgcaaactacactttaa

SEQ ID NO: 275319 - DNA, 25 bp, probe
tgccatccagcaagacttcgtgatt

SEQ ID NO: 275320 - DNA, 25 bp, probe
tgccatgcccaaggcctaggttatg

SEQ ID NO: 275321 - DNA, 25 bp, probe
tgccatccccaggtctcagatggaa

SEQ ID NO: 275322 - DNA, 25 bp, probe
tgccagccccagggcgatgtagcat

SEQ ID NO: 275323 - DNA, 25 bp, probe
tgccagttgccagggcaagtcactg

SEQ ID NO: 275324 - DNA, 25 bp, probe
tccagtggctctggaagtgcccttt

SEQ ID NO: 275325 - DNA, 25 bp, probe
tccagcaagtctacctggcactctt

SEQ ID NO: 275326 - DNA, 25 bp, probe
tccagcaagtctacctggcactctt

SEQ ID NO: 275327 - DNA, 25 bp, probe
tccagcaaggagttcaagcgcgctt

SEQ ID NO: 275328 - DNA, 25 bp, probe
tccagccggacaccggccgcattga

SEQ ID NO: 275329 - DNA, 25 bp, probe
tccaccaagatccaggacaccaaag

SEQ ID NO: 275330 - DNA, 25 bp, probe
tccaccaacatccagaccaaaaaga

SEQ ID NO: 275331 - DNA, 25 bp, probe
tcctccaaaacatcctttagatgca

SEQ ID NO: 275332 - DNA, 25 bp, probe
tccttgctaatacactccttgagga

SEQ ID NO: 275333 - DNA, 25 bp, probe
tccttgtaatattcccttttaggtg

SEQ ID NO: 275334 - DNA, 25 bp, probe
tccaactacatatttctctggttga

SEQ ID NO: 275335 - DNA, 25 bp, probe
tccaactacatatttctctggttga

SEQ ID NO: 275336 - DNA, 25 bp, probe
tccaacttcatttgatgctaaatag

SEQ ID NO: 275337 - DNA, 25 bp, probe
tgccaactgttgtaactaggctcag

SEQ ID NO: 275338 - DNA, 25 bp, probe
tccagaattatgtcaggttggcttg

SEQ ID NO: 275339 - DNA, 25 bp, probe
tccaaactctatcggctgatgcagc

SEQ ID NO: 275340 - DNA, 25 bp, probe
tgccaatgccttagcactggagagc

SEQ ID NO: 275341 - DNA, 25 bp, probe
tgccaatgcactcgatcttgtcatt

SEQ ID NO: 275342 - DNA, 25 bp, probe
tccaatgcaccaatcacagctcatg

SEQ ID NO: 275343 - DNA, 25 bp, probe
tgccagtgactagtccatgtcttcc

SEQ ID NO: 275344 - DNA, 25 bp, probe
tgccagctctaaatctcgatcttgc

SEQ ID NO: 275345 - DNA, 25 bp, probe
tccaatcttgcaacactatcctgtt

SEQ ID NO: 275346 - DNA, 25 bp, probe
tgccagactataagctgtacccatt

SEQ ID NO: 275347 - DNA, 25 bp, probe
tccagcactgatgtgtctaccttct

SEQ ID NO: 275348 - DNA, 25 bp, probe
tgccaagcacatgttctttctgtcc

SEQ ID NO: 275349 - DNA, 25 bp, probe
tccaaactcatcaatgtatcttatc

SEQ ID NO: 275350 - DNA, 25 bp, probe
tccaggccttattgttctttgtcgg

SEQ ID NO: 275351 - DNA, 25 bp, probe
tccaagacttatcagtctttatgga

SEQ ID NO: 275352 - DNA, 25 bp, probe
tccaagtgctgattaaatttttata

SEQ ID NO: 275353 - DNA, 25 bp, probe
tccacagttgttcaagaatcttcta

SEQ ID NO: 275354 - DNA, 25 bp, probe
tccacagttgttcaagaatcttcta

SEQ ID NO: 275355 - DNA, 25 bp, probe
tgccaaggctgtgggcaaggtcatc

SEQ ID NO: 275356 - DNA, 25 bp, probe
tgccaaggcctgtgacagaattcgc

SEQ ID NO: 275357 - DNA, 25 bp, probe
tccacggccgtggacatgtggtcag

SEQ ID NO: 275358 - DNA, 25 bp, probe
tccaccgaagcggaattctccatgc

SEQ ID NO: 275359 - DNA, 25 bp, probe
tccactgccaggcaggcatttcccg

SEQ ID NO: 275360 - DNA, 25 bp, probe
tccatctgcacatgaaggaccccca

SEQ ID NO: 275361 - DNA, 25 bp, probe
tgccaggaacagtaccctcaactca

SEQ ID NO: 275362 - DNA, 25 bp, probe
tccaagagactgcagccctcaaaat

SEQ ID NO: 275363 - DNA, 25 bp, probe
tctcaaagaatgaggcctccaaaca

SEQ ID NO: 275364 - DNA, 25 bp, probe
tccaaaaagagtgggcctcaggtga

SEQ ID NO: 275365 - DNA, 25 bp, probe
tccaaaaagagtgggcctcaggtga

SEQ ID NO: 275366 - DNA, 25 bp, probe
tctaataagaggatcagccgggtgc

SEQ ID NO: 275367 - DNA, 25 bp, probe
tctaattaaccacgcacccaggtta

SEQ ID NO: 275368 - DNA, 25 bp, probe
tccacattctaccaggacaccagtg

SEQ ID NO: 275369 - DNA, 25 bp, probe
tccaatatgctagtaaacacaagag

SEQ ID NO: 275370 - DNA, 25 bp, probe
tccactcgtactcccaaatgatgat

SEQ ID NO: 275371 - DNA, 25 bp, probe
tccactctggacactcaacaagacc

SEQ ID NO: 275372 - DNA, 25 bp, probe
tccacgtggagggccagaaacacat

SEQ ID NO: 275373 - DNA, 25 bp, probe
tccacctggcggtccagaggagcac

SEQ ID NO: 275374 - DNA, 25 bp, probe
tccacctggcggtccagaggagcac

SEQ ID NO: 275375 - DNA, 25 bp, probe
tccacctggcggtccagaggagcac

SEQ ID NO: 275376 - DNA, 25 bp, probe
tccagcctgggtgacagagcaagac

SEQ ID NO: 275377 - DNA, 25 bp, probe
tgccagtctggtcccaaacatcaat

SEQ ID NO: 275378 - DNA, 25 bp, probe
tccagctgcggcctgcacagaaccg

SEQ ID NO: 275379 - DNA, 25 bp, probe
tccacgacgcagcagagaacgggca

SEQ ID NO: 275380 - DNA, 25 bp, probe
tccacgacgcagcagagaacgggca

SEQ ID NO: 275381 - DNA, 25 bp, probe
tccacggcgtctcaggacgtggcca

SEQ ID NO: 275382 - DNA, 25 bp, probe
tccacgactttctgaacagtgcgcc

SEQ ID NO: 275383 - DNA, 25 bp, probe
tccacgactttctgaacagtgcgcc

SEQ ID NO: 275384 - DNA, 25 bp, probe
tccacgaccgccgcaagatgcggcc

SEQ ID NO: 275385 - DNA, 25 bp, probe
tccacgaccgccgcaagatgcggcc

SEQ ID NO: 275386 - DNA, 25 bp, probe
tccacgcccgcaacaaggtgggctg

SEQ ID NO: 275387 - DNA, 25 bp, probe
tccaggagagccacaaggctagccg

SEQ ID NO: 275388 - DNA, 25 bp, probe
tccaggagagtctcagcaagctcct

SEQ ID NO: 275389 - DNA, 25 bp, probe
tccagggatgtgatccggcatcctt

SEQ ID NO: 275390 - DNA, 25 bp, probe
tccagaggcatacctgcccaatgtc

SEQ ID NO: 275391 - DNA, 25 bp, probe
tccagactgcatggccagcctaatt

SEQ ID NO: 275392 - DNA, 25 bp, probe
tccagactatggacagctcggcacc

SEQ ID NO: 275393 - DNA, 25 bp, probe
tccagactatggacagctcggcacc

SEQ ID NO: 275394 - DNA, 25 bp, probe
tccaagctgagcacgctcgtggaaa

SEQ ID NO: 275395 - DNA, 25 bp, probe
tccacatcaggcctggccagctgga

SEQ ID NO: 275396 - DNA, 25 bp, probe
tccaatactgggttcagctgtatgg

SEQ ID NO: 275397 - DNA, 25 bp, probe
tccaatacatgggaagctttgctga

SEQ ID NO: 275398 - DNA, 25 bp, probe
tgccaatgaatgtgcctctctttca

SEQ ID NO: 275399 - DNA, 25 bp, probe
tgccaatgaatgtgcctctctttca

SEQ ID NO: 275400 - DNA, 25 bp, probe
tccacatatatttccacttcttcat

SEQ ID NO: 275401 - DNA, 25 bp, probe
tgccacttattggcctctcagttgt

SEQ ID NO: 275402 - DNA, 25 bp, probe
tgccacttcatttactgtctgctgg

SEQ ID NO: 275403 - DNA, 25 bp, probe
tccactccacgaacagtgcgctgag

SEQ ID NO: 275404 - DNA, 25 bp, probe
tgccacctgcaacaaggctctgaaa

SEQ ID NO: 275405 - DNA, 25 bp, probe
tgccaccgccagcaataattgacaa

SEQ ID NO: 275406 - DNA, 25 bp, probe
tccacaccaagtgcaagatcatcca

SEQ ID NO: 275407 - DNA, 25 bp, probe
tccagaagccggtcaagttccaggt

SEQ ID NO: 275408 - DNA, 25 bp, probe
tccagaagccggtcaagttccaggt

SEQ ID NO: 275409 - DNA, 25 bp, probe
tccaagaccctacagagcctgaggg

SEQ ID NO: 275410 - DNA, 25 bp, probe
tccaaacccccaaagcagagagagg

SEQ ID NO: 275411 - DNA, 25 bp, probe
tccacagccccatcaaagaacagag

SEQ ID NO: 275412 - DNA, 25 bp, probe
tccacagccccatcaaagaacagag

SEQ ID NO: 275413 - DNA, 25 bp, probe
tgccaacaccccagatgagagccaa

SEQ ID NO: 275414 - DNA, 25 bp, probe
tccagacctcggagaagctgaaaca

SEQ ID NO: 275415 - DNA, 25 bp, probe
tccaaccacgtggaaagctcctgga

SEQ ID NO: 275416 - DNA, 25 bp, probe
tccaggccacgggatgtagcctcgg

SEQ ID NO: 275417 - DNA, 25 bp, probe
tccaggcccacagcatggggcttgg

SEQ ID NO: 275418 - DNA, 25 bp, probe
tccaggtcctcagatgggaattgca

SEQ ID NO: 275419 - DNA, 25 bp, probe
tccagggccgactgcggaaatccct

SEQ ID NO: 275420 - DNA, 25 bp, probe
tccaggggtggctgggagactgggc

SEQ ID NO: 275421 - DNA, 25 bp, probe
tccactgtgggggcagagggagtgg

SEQ ID NO: 275422 - DNA, 25 bp, probe
tccacttctgggacaggcagtactg

SEQ ID NO: 275423 - DNA, 25 bp, probe
tgccacggctggagcgtgcagaggg

SEQ ID NO: 275424 - DNA, 25 bp, probe
tccagcgtgcggagcatctgaagtt

SEQ ID NO: 275425 - DNA, 25 bp, probe
tccagcgtgcggagcatctgaagtt

SEQ ID NO: 275426 - DNA, 25 bp, probe
tccagggtctgatcatcgacgcttt

SEQ ID NO: 275427 - DNA, 25 bp, probe
tccaaggactgagactgacctcctc

SEQ ID NO: 275428 - DNA, 25 bp, probe
tccaaggccgaggagtacttcctgc

SEQ ID NO: 275429 - DNA, 25 bp, probe
tccacggtagagggatacatcgcct

SEQ ID NO: 275430 - DNA, 25 bp, probe
tccaatggtcagtggatgactctgc

SEQ ID NO: 275431 - DNA, 25 bp, probe
tccagggctggccgtatgatctgtg

SEQ ID NO: 275432 - DNA, 25 bp, probe
tccaccggaggcaattgcactgtgt

SEQ ID NO: 275433 - DNA, 25 bp, probe
tccagccaaacgaatttctggcaaa

SEQ ID NO: 275434 - DNA, 25 bp, probe
tccacttataggaattgacccacaa

SEQ ID NO: 275435 - DNA, 25 bp, probe
tccacagtgatagccatgatgactc

SEQ ID NO: 275436 - DNA, 25 bp, probe
tccactggtttggcattcctcaata

SEQ ID NO: 275437 - DNA, 25 bp, probe
tccaatgctggttgatttccctcat

SEQ ID NO: 275438 - DNA, 25 bp, probe
tgccaattcagttgtcaatcccatt

SEQ ID NO: 275439 - DNA, 25 bp, probe
tgccaaacatgttgtcacacacaca

SEQ ID NO: 275440 - DNA, 25 bp, probe
tgccaaacatgttgtcacacacaca

SEQ ID NO: 275441 - DNA, 25 bp, probe
tgccaacagctgaagccgagcacag

SEQ ID NO: 275442 - DNA, 25 bp, probe
tccatgagcatggcatagtccaccg

SEQ ID NO: 275443 - DNA, 25 bp, probe
tgccaacaacattgtacatcgggac

SEQ ID NO: 275444 - DNA, 25 bp, probe
tgccaagaactgttgtgcaagtgtg

SEQ ID NO: 275445 - DNA, 25 bp, probe
tccactgacctctttccagcagtga

SEQ ID NO: 275446 - DNA, 25 bp, probe
tccactgacctctttccagcagtga

SEQ ID NO: 275447 - DNA, 25 bp, probe
tccacagtcatttcttctaggtttt

SEQ ID NO: 275448 - DNA, 25 bp, probe
tccacagtcatttcttctaggtttt

SEQ ID NO: 275449 - DNA, 25 bp, probe
tccacagtcaatgctgccttgtgat

SEQ ID NO: 275450 - DNA, 25 bp, probe
tccacagtcaatgctgccttgtgat

SEQ ID NO: 275451 - DNA, 25 bp, probe
tccactccagagatggggctgcttc

SEQ ID NO: 275452 - DNA, 25 bp, probe
tccactgtgaagctgggttctcctg

SEQ ID NO: 275453 - DNA, 25 bp, probe
tcgatcgtatatttctggtgtcccc

SEQ ID NO: 275454 - DNA, 25 bp, probe
tcgatcgtatatttctggtgtcccc

SEQ ID NO: 275455 - DNA, 25 bp, probe
tcgcacgttgtttagggtgccctta

SEQ ID NO: 275456 - DNA, 25 bp, probe
taccgttttaggtgtccagtacgct

SEQ ID NO: 275457 - DNA, 25 bp, probe
taaagttcctgacacgtccagggcc

SEQ ID NO: 275458 - DNA, 25 bp, probe
tcaaatattagtctttgtccggacc

SEQ ID NO: 275459 - DNA, 25 bp, probe
tcagaaaattgtccctttccggaag

SEQ ID NO: 275460 - DNA, 25 bp, probe
tccagaaattgtgccatttcgcctg

SEQ ID NO: 275461 - DNA, 25 bp, probe
tcgcagaccatagtgcccatctgcc

SEQ ID NO: 275462 - DNA, 25 bp, probe
tccaaccatcagcatctcatcatga

SEQ ID NO: 275463 - DNA, 25 bp, probe
tccacaagcacagaccatcatggag

SEQ ID NO: 275464 - DNA, 25 bp, probe
tccactacccaaccataatgagcca

SEQ ID NO: 275465 - DNA, 25 bp, probe
tccactacccaaccataatgagcca

SEQ ID NO: 275466 - DNA, 25 bp, probe
tccaccatccactctaccatgagtg

SEQ ID NO: 275467 - DNA, 25 bp, probe
tccagaaacacagccacctgcaatg

SEQ ID NO: 275468 - DNA, 25 bp, probe
tccagaaaaacgagcctcagctggc

SEQ ID NO: 275469 - DNA, 25 bp, probe
tccaaatcaacacaatgcactctgc

SEQ ID NO: 275470 - DNA, 25 bp, probe
tccagactcaaggagaggcagattc

SEQ ID NO: 275471 - DNA, 25 bp, probe
tccagacgccaggctacgagatgga

SEQ ID NO: 275472 - DNA, 25 bp, probe
tccagaccctgccaaaacatgagcc

SEQ ID NO: 275473 - DNA, 25 bp, probe
tccagactactcgaaatggcgtccg

SEQ ID NO: 275474 - DNA, 25 bp, probe
tccacatcaactgatgctatgtgct

SEQ ID NO: 275475 - DNA, 25 bp, probe
tccatcatcaaccctgtcatatatg

SEQ ID NO: 275476 - DNA, 25 bp, probe
tccatcatcaaccctgtcatatatg

SEQ ID NO: 275477 - DNA, 25 bp, probe
tccagctctgaggactctgacattg

SEQ ID NO: 275478 - DNA, 25 bp, probe
tccatgccgctgcagacagatctga

SEQ ID NO: 275479 - DNA, 25 bp, probe
tccatccggggaagtcatgcatttc

SEQ ID NO: 275480 - DNA, 25 bp, probe
tcccgtggaggaactttttaagctg

SEQ ID NO: 275481 - DNA, 25 bp, probe
tccactgcggggaactttgtgtacc

SEQ ID NO: 275482 - DNA, 25 bp, probe
tccaccatgcggacaatcattttgt

SEQ ID NO: 275483 - DNA, 25 bp, probe
tccaccatgcggacaatcattttgt

SEQ ID NO: 275484 - DNA, 25 bp, probe
tccatcagccggacaacattgggat

SEQ ID NO: 275485 - DNA, 25 bp, probe
tccagcgccagctcaacaggctgga

SEQ ID NO: 275486 - DNA, 25 bp, probe
tccactgcaacatcaaagtgcaagc

SEQ ID NO: 275487 - DNA, 25 bp, probe
tccacagcttcatttagagtacaga

SEQ ID NO: 275488 - DNA, 25 bp, probe
tccacacttcctgggaggtcagaga

SEQ ID NO: 275489 - DNA, 25 bp, probe
tccaggtcttcgggagttcagcagt

SEQ ID NO: 275490 - DNA, 25 bp, probe
tccaaacctctgctagttcagatgg

SEQ ID NO: 275491 - DNA, 25 bp, probe
tccaaacacctagtcaatacagatt

SEQ ID NO: 275492 - DNA, 25 bp, probe
tccaagacacttattcatacatcag

SEQ ID NO: 275493 - DNA, 25 bp, probe
tccaagacctggaagtcacacaata

SEQ ID NO: 275494 - DNA, 25 bp, probe
tccaaaccaatgagatggccatttt

SEQ ID NO: 275495 - DNA, 25 bp, probe
tccagaccaaacagaggcttcttct

SEQ ID NO: 275496 - DNA, 25 bp, probe
tccagactcacagcattgagaatta

SEQ ID NO: 275497 - DNA, 25 bp, probe
tccaaaaacacattcaggcattagc

SEQ ID NO: 275498 - DNA, 25 bp, probe
tccaaaaacacattcaggcattagc

SEQ ID NO: 275499 - DNA, 25 bp, probe
tccaaattccacaataagcaatatg

SEQ ID NO: 275500 - DNA, 25 bp, probe
tccaatcatttgccatttatgacaa

SEQ ID NO: 275501 - DNA, 25 bp, probe
tccaatctgcgtccacttaggaggc

SEQ ID NO: 275502 - DNA, 25 bp, probe
tccacattgattccacggagggcag

SEQ ID NO: 275503 - DNA, 25 bp, probe
tccacattgattccacggagggcag

SEQ ID NO: 275504 - DNA, 25 bp, probe
tccactttctagccagaggagagag

SEQ ID NO: 275505 - DNA, 25 bp, probe
tccacatttgtcacagaaatcagag

SEQ ID NO: 275506 - DNA, 25 bp, probe
tccaacttgctcatgaccgacaagg

SEQ ID NO: 275507 - DNA, 25 bp, probe
tccacgacctctaagccgagagagg

SEQ ID NO: 275508 - DNA, 25 bp, probe
tccacagtccttgtgctctgagatg

SEQ ID NO: 275509 - DNA, 25 bp, probe
tccactgaccggctgcgcaaatgga

SEQ ID NO: 275510 - DNA, 25 bp, probe
tccactgtgaagggcgtcaatctgg

SEQ ID NO: 275511 - DNA, 25 bp, probe
tccacttcaggtggtacacactcag

SEQ ID NO: 275512 - DNA, 25 bp, probe
tccacagtgggtgctgacagcagcc

SEQ ID NO: 275513 - DNA, 25 bp, probe
tccaggggctgaggtgacagcattg

SEQ ID NO: 275514 - DNA, 25 bp, probe
tccatggagatagaatgaagcattc

SEQ ID NO: 275515 - DNA, 25 bp, probe
tccaggcagtgacacgacgattctc

SEQ ID NO: 275516 - DNA, 25 bp, probe
tccagagaacacaccagctatttat

SEQ ID NO: 275517 - DNA, 25 bp, probe
tccaggaaaccctttattcagaaag

SEQ ID NO: 275518 - DNA, 25 bp, probe
tccaggaaatccaggtgggcaaaac

SEQ ID NO: 275519 - DNA, 25 bp, probe
tccaaggacctcacgatggtgctga

SEQ ID NO: 275520 - DNA, 25 bp, probe
tccaaggacctcacgatggtgctga

SEQ ID NO: 275521 - DNA, 25 bp, probe
tccacagccaacatcacgaggtgta

SEQ ID NO: 275522 - DNA, 25 bp, probe
tccatgcagcgaacatcgaccgcgt

SEQ ID NO: 275523 - DNA, 25 bp, probe
tccacattgaccagatgccgcagac

SEQ ID NO: 275524 - DNA, 25 bp, probe
tccacatctacaacgtgggcacgcg

SEQ ID NO: 275525 - DNA, 25 bp, probe
tccacaccaccactgtggaccagtg

SEQ ID NO: 275526 - DNA, 25 bp, probe
tccaacacaccactggtgcgcatcg

SEQ ID NO: 275527 - DNA, 25 bp, probe
tccaacgacatcatgctactgcagc

SEQ ID NO: 275528 - DNA, 25 bp, probe
tccaatcggcacttgtgtctcaatg

SEQ ID NO: 275529 - DNA, 25 bp, probe
tccacaaggccattgctgctgtaat

SEQ ID NO: 275530 - DNA, 25 bp, probe
tccataaggtcatgcctttaagtaa

SEQ ID NO: 275531 - DNA, 25 bp, probe
tcctttttgcacccttaaatgtaag

SEQ ID NO: 275532 - DNA, 25 bp, probe
tcctttttcccctctgagacaagga

SEQ ID NO: 275533 - DNA, 25 bp, probe
tcgctttttaccgccagatgaaatc

SEQ ID NO: 275534 - DNA, 25 bp, probe
tccaccatgatttcatagcccagta

SEQ ID NO: 275535 - DNA, 25 bp, probe
tccatccatttttaactctttcgga

SEQ ID NO: 275536 - DNA, 25 bp, probe
tccaccttcatttaactctttgaaa

SEQ ID NO: 275537 - DNA, 25 bp, probe
tccactcctgaacaactcattgaaa

SEQ ID NO: 275538 - DNA, 25 bp, probe
tttgtcctaaggtgtttaaaacatg

SEQ ID NO: 275539 - DNA, 25 bp, probe
tatttgccctggagttttagaaaat

SEQ ID NO: 275540 - DNA, 25 bp, probe
tccattccctggagtttgggggaag

SEQ ID NO: 275541 - DNA, 25 bp, probe
tccactcccttgtgatttctgaggg

SEQ ID NO: 275542 - DNA, 25 bp, probe
tccttcccattgtttacagtgaagg

SEQ ID NO: 275543 - DNA, 25 bp, probe
tccaatgtccttatcaacaaggagg

SEQ ID NO: 275544 - DNA, 25 bp, probe
tccaagcctgcgtgtcataaactga

SEQ ID NO: 275545 - DNA, 25 bp, probe
tccaaccaatgctgtgcctcaaaga

SEQ ID NO: 275546 - DNA, 25 bp, probe
tccaaccaatgctgtgcctcaaaga

SEQ ID NO: 275547 - DNA, 25 bp, probe
tccacccacagggtgccgctagaac

SEQ ID NO: 275548 - DNA, 25 bp, probe
tccaccccaggaatcctgcactgaa

SEQ ID NO: 275549 - DNA, 25 bp, probe
tccgcaccatcatgaagcacgacgg

SEQ ID NO: 275550 - DNA, 25 bp, probe
tcctcaacatattcgagctcaacgg

SEQ ID NO: 275551 - DNA, 25 bp, probe
tccttactgaagccaggcaccgtgg

SEQ ID NO: 275552 - DNA, 25 bp, probe
tccttactgaagccaggcaccgtgg

SEQ ID NO: 275553 - DNA, 25 bp, probe
tccattagtacggccgccagtgtgt

SEQ ID NO: 275554 - DNA, 25 bp, probe
tccattcagaagcggctccgtgctg

SEQ ID NO: 275555 - DNA, 25 bp, probe
tccagccaagcacagtctactgttg

SEQ ID NO: 275556 - DNA, 25 bp, probe
tccaccaaggtacctacattctacc

SEQ ID NO: 275557 - DNA, 25 bp, probe
tccaaaactacatctacttcttcca

SEQ ID NO: 275558 - DNA, 25 bp, probe
tccaaaactacatctacttcttcca

SEQ ID NO: 275559 - DNA, 25 bp, probe
tcctaaactttagacttcccactgt

SEQ ID NO: 275560 - DNA, 25 bp, probe
tcctaaactttagacttcccactgt

SEQ ID NO: 275561 - DNA, 25 bp, probe
tccaaactcttaaccagttctccat

SEQ ID NO: 275562 - DNA, 25 bp, probe
tccaaaacgtttccagcatctttca

SEQ ID NO: 275563 - DNA, 25 bp, probe
tccagaaactgatttgtaactcatt

SEQ ID NO: 275564 - DNA, 25 bp, probe
tccacaaatgcttagagttaccact

SEQ ID NO: 275565 - DNA, 25 bp, probe
tccacttccagatcagtaaccctga

SEQ ID NO: 275566 - DNA, 25 bp, probe
tccagttggagaccgtcaaccttca

SEQ ID NO: 275567 - DNA, 25 bp, probe
tccagtgggaggggcccaagatctc

SEQ ID NO: 275568 - DNA, 25 bp, probe
tccagggagggctgccattcattcc

SEQ ID NO: 275569 - DNA, 25 bp, probe
tccaggaagcggctggagacattcc

SEQ ID NO: 275570 - DNA, 25 bp, probe
tccacacaagtctggccgaattcct

SEQ ID NO: 275571 - DNA, 25 bp, probe
tccacacaagtctggccgaattcct

SEQ ID NO: 275572 - DNA, 25 bp, probe
tccaggtagtgctgcttctgaagtt

SEQ ID NO: 275573 - DNA, 25 bp, probe
tccaggccgagaggcttccacagaa

SEQ ID NO: 275574 - DNA, 25 bp, probe
tccaggccgagaggcttccacagaa

SEQ ID NO: 275575 - DNA, 25 bp, probe
tccatggaccaggcacctgtcgagt

SEQ ID NO: 275576 - DNA, 25 bp, probe
tccggatcaactatgctgacgagat

SEQ ID NO: 275577 - DNA, 25 bp, probe
tccaggaacatgtcttcaagcgagc

SEQ ID NO: 275578 - DNA, 25 bp, probe
tccagtcaacattcactctgcagct

SEQ ID NO: 275579 - DNA, 25 bp, probe
tccacgaacagtgcgctgagctacc

SEQ ID NO: 275580 - DNA, 25 bp, probe
tccactgaactgtgcggatgccaca

SEQ ID NO: 275581 - DNA, 25 bp, probe
tccacagtcacgtgggctccaagga

SEQ ID NO: 275582 - DNA, 25 bp, probe
tccacagagacctggtgtccatatc

SEQ ID NO: 275583 - DNA, 25 bp, probe
tccatcctgacctggtatggtcatg

SEQ ID NO: 275584 - DNA, 25 bp, probe
tccaccgccactgtgtgaaactgta

SEQ ID NO: 275585 - DNA, 25 bp, probe
tccatcacgccattgacttggcaac

SEQ ID NO: 275586 - DNA, 25 bp, probe
tccacaccacagtactcagagtgac

SEQ ID NO: 275587 - DNA, 25 bp, probe
tccacaccacagtactcagagtgac

SEQ ID NO: 275588 - DNA, 25 bp, probe
tccacacggaggtcagctgagtccg

SEQ ID NO: 275589 - DNA, 25 bp, probe
tccaccaagaagtcacagagcccgt

SEQ ID NO: 275590 - DNA, 25 bp, probe
tccacctatgtaacaaggcaccgct

SEQ ID NO: 275591 - DNA, 25 bp, probe
tccacatttgtctcaagacccatta

SEQ ID NO: 275592 - DNA, 25 bp, probe
tccacatttgtctcaagacccatta

SEQ ID NO: 275593 - DNA, 25 bp, probe
tccacatattattctctaactacac

SEQ ID NO: 275594 - DNA, 25 bp, probe
tccacacttaatataattcgccact

SEQ ID NO: 275595 - DNA, 25 bp, probe
tccacagttgactacatccttacca

SEQ ID NO: 275596 - DNA, 25 bp, probe
tccacagtgttgccagagccttaat

SEQ ID NO: 275597 - DNA, 25 bp, probe
tcctctgagttccatctcctataat

SEQ ID NO: 275598 - DNA, 25 bp, probe
tccacttgttcttctcacatgattg

SEQ ID NO: 275599 - DNA, 25 bp, probe
tccatttgcagcctgctttcaattg

SEQ ID NO: 275600 - DNA, 25 bp, probe
tccatttccgttcctggatctacgg

SEQ ID NO: 275601 - DNA, 25 bp, probe
tcctttccctgatgggttggggcag

SEQ ID NO: 275602 - DNA, 25 bp, probe
tcctttcccatgaaccctggagggt

SEQ ID NO: 275603 - DNA, 25 bp, probe
tccaactttgctaactcctggcatg

SEQ ID NO: 275604 - DNA, 25 bp, probe
tccttttggctaacttcttctgggc

SEQ ID NO: 275605 - DNA, 25 bp, probe
tccacttttaaagttcatgggtgag

SEQ ID NO: 275606 - DNA, 25 bp, probe
tccacttttaaagttcatgggtgag

SEQ ID NO: 275607 - DNA, 25 bp, probe
tccagcattacagaaccttggttat

SEQ ID NO: 275608 - DNA, 25 bp, probe
tccactgagatagaagccctggtca

SEQ ID NO: 275609 - DNA, 25 bp, probe
tccaggaggaccactctctgtggca

SEQ ID NO: 275610 - DNA, 25 bp, probe
tccaggggactcattactctgtgca

SEQ ID NO: 275611 - DNA, 25 bp, probe
tccactgggacaaattagttctgat

SEQ ID NO: 275612 - DNA, 25 bp, probe
tccacggaggatttggagtcctgaa

SEQ ID NO: 275613 - DNA, 25 bp, probe
tccactgggtgccttggaacgcaag

SEQ ID NO: 275614 - DNA, 25 bp, probe
tccaagcggcttttggaaagtggct

SEQ ID NO: 275615 - DNA, 25 bp, probe
tccactgcccaatgtggagacgggt

SEQ ID NO: 275616 - DNA, 25 bp, probe
tccacatccccagctgtatgaggag

SEQ ID NO: 275617 - DNA, 25 bp, probe
tccacatccccagctgtatgaggag

SEQ ID NO: 275618 - DNA, 25 bp, probe
tccacatgccagcaccgtatatgga

SEQ ID NO: 275619 - DNA, 25 bp, probe
tccaaagatgagtttgtatcatgga

SEQ ID NO: 275620 - DNA, 25 bp, probe
tccagactatggatgtgttctctag

SEQ ID NO: 275621 - DNA, 25 bp, probe
tccagcattcgatgcatttttatag

SEQ ID NO: 275622 - DNA, 25 bp, probe
tccagatgacgatcatctttccatc

SEQ ID NO: 275623 - DNA, 25 bp, probe
tccagatctggtgatctatgtctac

SEQ ID NO: 275624 - DNA, 25 bp, probe
tccgcctggcgtacaggtctaagcc

SEQ ID NO: 275625 - DNA, 25 bp, probe
tccgcctggcgtacaggtctaagcc

SEQ ID NO: 275626 - DNA, 25 bp, probe
tccagcctgggcaacgagtgaaact

SEQ ID NO: 275627 - DNA, 25 bp, probe
tccagcctaggcaacagaatgagac

SEQ ID NO: 275628 - DNA, 25 bp, probe
tccagcctgggcgacagagcgagac

SEQ ID NO: 275629 - DNA, 25 bp, probe
tccagttggagcctgcagagccagg

SEQ ID NO: 275630 - DNA, 25 bp, probe
tccagtctaagcagagagactgatg

SEQ ID NO: 275631 - DNA, 25 bp, probe
tccacgctgatgacgcagaagacgg

SEQ ID NO: 275632 - DNA, 25 bp, probe
tccagcaggatcacagttacacagg

SEQ ID NO: 275633 - DNA, 25 bp, probe
tccagcaggattgagtcaccctgac

SEQ ID NO: 275634 - DNA, 25 bp, probe
tccagcgtgacttatgtacccagaa

SEQ ID NO: 275635 - DNA, 25 bp, probe
tccagctcgaattctgtgactccaa

SEQ ID NO: 275636 - DNA, 25 bp, probe
tccagagcttgatctgggcattcca

SEQ ID NO: 275637 - DNA, 25 bp, probe
tccagattgtgagccgccaatatca

SEQ ID NO: 275638 - DNA, 25 bp, probe
tccagagtatgtagccccagagatc

SEQ ID NO: 275639 - DNA, 25 bp, probe
tccggagctgatagcactctcgagt

SEQ ID NO: 275640 - DNA, 25 bp, probe
tccagactgtcaagagcctgcggct

SEQ ID NO: 275641 - DNA, 25 bp, probe
tccagactgtcaagagcctgcggct

SEQ ID NO: 275642 - DNA, 25 bp, probe
tccagattctcaaaccagaggctaa

SEQ ID NO: 275643 - DNA, 25 bp, probe
tccatttctcagtgacagaagcatg

SEQ ID NO: 275644 - DNA, 25 bp, probe
tccagttgccattgagtagcaaagc

SEQ ID NO: 275645 - DNA, 25 bp, probe
tccagctgtccacattgagtcagac

SEQ ID NO: 275646 - DNA, 25 bp, probe
tcgcattgtccggagatacctactc

SEQ ID NO: 275647 - DNA, 25 bp, probe
tccttgtgccgtagtgaccaggcct

SEQ ID NO: 275648 - DNA, 25 bp, probe
tccttgtgccgtagtgaccaggcct

SEQ ID NO: 275649 - DNA, 25 bp, probe
tcctatgcacatcctttaactgtcc

SEQ ID NO: 275650 - DNA, 25 bp, probe
tcctatccttcttagaagcttcgaa

SEQ ID NO: 275651 - DNA, 25 bp, probe
tccttccatcttgtggggccaggac

SEQ ID NO: 275652 - DNA, 25 bp, probe
tcctttctacttggagggcctggac

SEQ ID NO: 275653 - DNA, 25 bp, probe
tccttaataataataggtcctactt

SEQ ID NO: 275654 - DNA, 25 bp, probe
tccttttgttgaaatggcatcgtac

SEQ ID NO: 275655 - DNA, 25 bp, probe
tcgtcctttgggtatggttgctagc

SEQ ID NO: 275656 - DNA, 25 bp, probe
tcctcactttgatgttgttttgcaa

SEQ ID NO: 275657 - DNA, 25 bp, probe
tcctactcttcatgggctattccac

SEQ ID NO: 275658 - DNA, 25 bp, probe
tcctacatttgcataatctccacca

SEQ ID NO: 275659 - DNA, 25 bp, probe
tccagatttagcctcagatcttccc

SEQ ID NO: 275660 - DNA, 25 bp, probe
tccagaatgtgatctcttctttcca

SEQ ID NO: 275661 - DNA, 25 bp, probe
tccagttggagagttctcggagcca

SEQ ID NO: 275662 - DNA, 25 bp, probe
tccacctggagggtgtcgtgaccaa

SEQ ID NO: 275663 - DNA, 25 bp, probe
tccatcgtggagtgttctctcagct

SEQ ID NO: 275664 - DNA, 25 bp, probe
tccatggcgtgaccagctttgtttc

SEQ ID NO: 275665 - DNA, 25 bp, probe
tccagtgctgaatccgttgatttat

SEQ ID NO: 275666 - DNA, 25 bp, probe
tccagtctattttctgtcttgttaa

SEQ ID NO: 275667 - DNA, 25 bp, probe
tccagtctattttctgtcttgttaa

SEQ ID NO: 275668 - DNA, 25 bp, probe
tccagctttgttgctgctctggtat

SEQ ID NO: 275669 - DNA, 25 bp, probe
tccacttcttgatatgactgagatt

SEQ ID NO: 275670 - DNA, 25 bp, probe
tccacgttctgcaaggactgtgttc

SEQ ID NO: 275671 - DNA, 25 bp, probe
tccaggtatgagaatcaacttggtc

SEQ ID NO: 275672 - DNA, 25 bp, probe
tccagtgttggaattctttggtgta

SEQ ID NO: 275673 - DNA, 25 bp, probe
tccacttctggaactactttatcta

SEQ ID NO: 275674 - DNA, 25 bp, probe
tccatttctggaagtgactttggct

SEQ ID NO: 275675 - DNA, 25 bp, probe
tccattgggtgggttcttttgtaca

SEQ ID NO: 275676 - DNA, 25 bp, probe
tccattgggtgggttcttttgtaca

SEQ ID NO: 275677 - DNA, 25 bp, probe
tccacgggtgtgctgcctaatggta

SEQ ID NO: 275678 - DNA, 25 bp, probe
tccatgggctttttggcatcaaggt

SEQ ID NO: 275679 - DNA, 25 bp, probe
tccaggtgtggagtgggacagaagt

SEQ ID NO: 275680 - DNA, 25 bp, probe
tccagagggccaagaagatcgacaa

SEQ ID NO: 275681 - DNA, 25 bp, probe
tccagagggccaagaagatcgacaa

SEQ ID NO: 275682 - DNA, 25 bp, probe
tccagacactccaaaggtctccaga

SEQ ID NO: 275683 - DNA, 25 bp, probe
tccatacttcggtagcagtcgacag

SEQ ID NO: 275684 - DNA, 25 bp, probe
tccaaattcatgtaccattctcata

SEQ ID NO: 275685 - DNA, 25 bp, probe
tccacacattatcacctacgcgata

SEQ ID NO: 275686 - DNA, 25 bp, probe
aatcccaagacatcaatcaatcttt

SEQ ID NO: 275687 - DNA, 25 bp, probe
tccacgcttgatctacttcaagagc

SEQ ID NO: 275688 - DNA, 25 bp, probe
tccaccatggaagtcagttcctggc

SEQ ID NO: 275689 - DNA, 25 bp, probe
tccaccttgaagttgtccacattgc

SEQ ID NO: 275690 - DNA, 25 bp, probe
tccactttgagtttgcttattgatg

SEQ ID NO: 275691 - DNA, 25 bp, probe
tccactttgacttcgtactgtcttt

SEQ ID NO: 275692 - DNA, 25 bp, probe
tccatctttaaactgtgatcttctt

SEQ ID NO: 275693 - DNA, 25 bp, probe
tccacgtgtagactttgcgcttgat

SEQ ID NO: 275694 - DNA, 25 bp, probe
tccattggtacaaatccgctctgat

SEQ ID NO: 275695 - DNA, 25 bp, probe
tccacctgtagctataccagccaga

SEQ ID NO: 275696 - DNA, 25 bp, probe
tccaccagtacattgacgcagacac

SEQ ID NO: 275697 - DNA, 25 bp, probe
tccaccaggccattaatgatgcaca

SEQ ID NO: 275698 - DNA, 25 bp, probe
tccaccaggccattaatgatgcaca

SEQ ID NO: 275699 - DNA, 25 bp, probe
tccataaggaattcgatgatgacac

SEQ ID NO: 275700 - DNA, 25 bp, probe
tccagcagcaggtacctcattgaca

SEQ ID NO: 275701 - DNA, 25 bp, probe
tccatgtcagagtcacctgatgtca

SEQ ID NO: 275702 - DNA, 25 bp, probe
tccatgtcagagtcacctgatgtca

SEQ ID NO: 275703 - DNA, 25 bp, probe
tccatgttgtccatatgatgattga

SEQ ID NO: 275704 - DNA, 25 bp, probe
tccagactggaaatgtatgaatgat

SEQ ID NO: 275705 - DNA, 25 bp, probe
tccacagtggaaatctggagactgg

SEQ ID NO: 275706 - DNA, 25 bp, probe
tccacatgtgggacagggctggtgt

SEQ ID NO: 275707 - DNA, 25 bp, probe
tccacttccatggctggcctgaagt

SEQ ID NO: 275708 - DNA, 25 bp, probe
tccagattgcaacctggcctgcatc

SEQ ID NO: 275709 - DNA, 25 bp, probe
tccacagtccaagtggcctcatcac

SEQ ID NO: 275710 - DNA, 25 bp, probe
tccagctgtgcctgagaggtactgc

SEQ ID NO: 275711 - DNA, 25 bp, probe
tccacatgtccacaggtgttgcata

SEQ ID NO: 275712 - DNA, 25 bp, probe
tccacagctgccttcagtgggtaga

SEQ ID NO: 275713 - DNA, 25 bp, probe
tccacgctgcacacagtgctgtggg

SEQ ID NO: 275714 - DNA, 25 bp, probe
tcctacgacaacttcagtgggcatc

SEQ ID NO: 275715 - DNA, 25 bp, probe
tccagaggagcaccttcctgagtgt

SEQ ID NO: 275716 - DNA, 25 bp, probe
tccagaggagcaccttcctgagtgt

SEQ ID NO: 275717 - DNA, 25 bp, probe
tccagaggagcaccttcctgagtgt

SEQ ID NO: 275718 - DNA, 25 bp, probe
tccacaggagcagctggccgtggca

SEQ ID NO: 275719 - DNA, 25 bp, probe
tccacagaactcttgagcctgctgg

SEQ ID NO: 275720 - DNA, 25 bp, probe
tccacagacccatcagcactgatgt

SEQ ID NO: 275721 - DNA, 25 bp, probe
tccagagcagccggaacctgcattg

SEQ ID NO: 275722 - DNA, 25 bp, probe
tccacaagcagcggaagcctgaccg

SEQ ID NO: 275723 - DNA, 25 bp, probe
tccacagagagctgcaacaccacca

SEQ ID NO: 275724 - DNA, 25 bp, probe
tccacagcagagccggaactctcta

SEQ ID NO: 275725 - DNA, 25 bp, probe
tccacagcaagatgtgatcctgcca

SEQ ID NO: 275726 - DNA, 25 bp, probe
tccacacacatgcagttcctgcttg

SEQ ID NO: 275727 - DNA, 25 bp, probe
tcgaagcatctgaatcatgtccact

SEQ ID NO: 275728 - DNA, 25 bp, probe
tccagacattgttgctgagacagca

SEQ ID NO: 275729 - DNA, 25 bp, probe
tccactgcactgtgctagcagctca

SEQ ID NO: 275730 - DNA, 25 bp, probe
tccactgcactgtgctagcagctca

SEQ ID NO: 275731 - DNA, 25 bp, probe
tccacatactgtggctacagcaccc

SEQ ID NO: 275732 - DNA, 25 bp, probe
tccagagcctgggctactgcatgct

SEQ ID NO: 275733 - DNA, 25 bp, probe
tccagacctaacactgccttgttgg

SEQ ID NO: 275734 - DNA, 25 bp, probe
tccttgcctttcacgatttttgcat

SEQ ID NO: 275735 - DNA, 25 bp, probe
tccattcctatttttaataaatctc

SEQ ID NO: 275736 - DNA, 25 bp, probe
tccagcctataatcctaagaacttc

SEQ ID NO: 275737 - DNA, 25 bp, probe
tccaccctataccctaaataactgt

SEQ ID NO: 275738 - DNA, 25 bp, probe
tccacccttcaacccaaatgtgaca

SEQ ID NO: 275739 - DNA, 25 bp, probe
tccacccttcaacccaaatgtgaca

SEQ ID NO: 275740 - DNA, 25 bp, probe
tccataccgttactctgatgaattg

SEQ ID NO: 275741 - DNA, 25 bp, probe
tccatgatcctgataggcaaggttt

SEQ ID NO: 275742 - DNA, 25 bp, probe
tccagatgccaaatatgccaaggtg

SEQ ID NO: 275743 - DNA, 25 bp, probe
tcgaatccaatgtgccatcaagtca

SEQ ID NO: 275744 - DNA, 25 bp, probe
tatctactactatccataaatgcaa

SEQ ID NO: 275745 - DNA, 25 bp, probe
tcctacttcagctcccacaagtagc

SEQ ID NO: 275746 - DNA, 25 bp, probe
tcccaagacctaccaaccatgtagg

SEQ ID NO: 275747 - DNA, 25 bp, probe
tcctgcaagtcctgtaacctgtaca

SEQ ID NO: 275748 - DNA, 25 bp, probe
tcctgcaagtcctgtaacctgtaca

SEQ ID NO: 275749 - DNA, 25 bp, probe
tcccattgtctatgcttaccggaac

SEQ ID NO: 275750 - DNA, 25 bp, probe
tccctgatgtcatccttactcgaag

SEQ ID NO: 275751 - DNA, 25 bp, probe
tcccttcttacttaacctgaagcta

SEQ ID NO: 275752 - DNA, 25 bp, probe
tccagcttgtctttttactctttgc

SEQ ID NO: 275753 - DNA, 25 bp, probe
tccagtcatttgtcaaagactgcct

SEQ ID NO: 275754 - DNA, 25 bp, probe
tccatgagctcttatgccagaaccc

SEQ ID NO: 275755 - DNA, 25 bp, probe
tccatgagctcttatgccagaaccc

SEQ ID NO: 275756 - DNA, 25 bp, probe
tccatgagctcttatgccagaaccc

SEQ ID NO: 275757 - DNA, 25 bp, probe
tccagaagcatctgccaaagcccag

SEQ ID NO: 275758 - DNA, 25 bp, probe
tccactagcatctacctggaggcca

SEQ ID NO: 275759 - DNA, 25 bp, probe
tccactcagatagcgcatgaaccca

SEQ ID NO: 275760 - DNA, 25 bp, probe
tccaccatctagaagctgaagacga

SEQ ID NO: 275761 - DNA, 25 bp, probe
tccagccttaatttgaaagcagacg

SEQ ID NO: 275762 - DNA, 25 bp, probe
tccaccgtgaagcgaaagagccagt

SEQ ID NO: 275763 - DNA, 25 bp, probe
tccaccaggcacgggaagaggagcc

SEQ ID NO: 275764 - DNA, 25 bp, probe
tccaccagcacaaatcgaagcagga

SEQ ID NO: 275765 - DNA, 25 bp, probe
tccagggcatctctgccaaaggtct

SEQ ID NO: 275766 - DNA, 25 bp, probe
tccagggcatcacatcctggggctc

SEQ ID NO: 275767 - DNA, 25 bp, probe
tccagtgactgggacactcgggtct

SEQ ID NO: 275768 - DNA, 25 bp, probe
tccaggcagtcggacatcctaggct

SEQ ID NO: 275769 - DNA, 25 bp, probe
tccaggtagctggagacctaggcag

SEQ ID NO: 275770 - DNA, 25 bp, probe
tccagaaatgtggaactccagccta

SEQ ID NO: 275771 - DNA, 25 bp, probe
tccagcaactgggatgacgacagcc

SEQ ID NO: 275772 - DNA, 25 bp, probe
tccagcaactgaattgtggtcacga

SEQ ID NO: 275773 - DNA, 25 bp, probe
tccagaacagtgccttggtcatccc

SEQ ID NO: 275774 - DNA, 25 bp, probe
tccagaacagtgccttggtcatccc

SEQ ID NO: 275775 - DNA, 25 bp, probe
tccaggagcgtgacactggtgatcg

SEQ ID NO: 275776 - DNA, 25 bp, probe
tcccccacgtacgagtatgcgttga

SEQ ID NO: 275777 - DNA, 25 bp, probe
tcccccacgtacgagtatgcgttga

SEQ ID NO: 275778 - DNA, 25 bp, probe
tcctgactacgtcccaaaggtcgac

SEQ ID NO: 275779 - DNA, 25 bp, probe
tcctaccaagttcaccgtatctgtg

SEQ ID NO: 275780 - DNA, 25 bp, probe
tcctcaccaagttcaaacagtcgag

SEQ ID NO: 275781 - DNA, 25 bp, probe
tccatcctgaggacgaaccgtgcgg

SEQ ID NO: 275782 - DNA, 25 bp, probe
tccacctggcaagtgacatcctgtc

SEQ ID NO: 275783 - DNA, 25 bp, probe
tccagcctgactttgatcatcagga

SEQ ID NO: 275784 - DNA, 25 bp, probe
tccaggtgttggtacatatgatgat

SEQ ID NO: 275785 - DNA, 25 bp, probe
tccagtctattcaaggcattgagaa

SEQ ID NO: 275786 - DNA, 25 bp, probe
tccactgttgctcagccatctgaga

SEQ ID NO: 275787 - DNA, 25 bp, probe
tccacatcaaggcagccatccagca

SEQ ID NO: 275788 - DNA, 25 bp, probe
tccagaaagggacagccacggccaa

SEQ ID NO: 275789 - DNA, 25 bp, probe
tccgagaagggacatgtgggacgtg

SEQ ID NO: 275790 - DNA, 25 bp, probe
tccccaagtgtctctggggacctga

SEQ ID NO: 275791 - DNA, 25 bp, probe
tccttcacggactcgaagtgacctt

SEQ ID NO: 275792 - DNA, 25 bp, probe
tcctctgacggaccactaagctggg

SEQ ID NO: 275793 - DNA, 25 bp, probe
tacaataagggtactatatgtgggt

SEQ ID NO: 275794 - DNA, 25 bp, probe
tccagtacgctggttttagtggctt

SEQ ID NO: 275795 - DNA, 25 bp, probe
tccagaacctggaacctagaggcct

SEQ ID NO: 275796 - DNA, 25 bp, probe
tccaggacctgaaccggaagctgca

SEQ ID NO: 275797 - DNA, 25 bp, probe
tccagtacaggaaggcagtgaaggc

SEQ ID NO: 275798 - DNA, 25 bp, probe
tccagtaagtagaattatctcttca

SEQ ID NO: 275799 - DNA, 25 bp, probe
tccgattgcgttatttcttctactc

SEQ ID NO: 275800 - DNA, 25 bp, probe
tccagttggaacactttcctgagat

SEQ ID NO: 275801 - DNA, 25 bp, probe
tccactctggaaccttattccagca

SEQ ID NO: 275802 - DNA, 25 bp, probe
tccaccgagatatcaaagctgccaa

SEQ ID NO: 275803 - DNA, 25 bp, probe
tccaccgagatatcaaagctgccaa

SEQ ID NO: 275804 - DNA, 25 bp, probe
tccacctagacatcaagccagacaa

SEQ ID NO: 275805 - DNA, 25 bp, probe
tccacgctgaccttaagcctgaaaa

SEQ ID NO: 275806 - DNA, 25 bp, probe
tccactggcctcctagaggcttaga

SEQ ID NO: 275807 - DNA, 25 bp, probe
tccagtacctctaaggactctagaa

SEQ ID NO: 275808 - DNA, 25 bp, probe
tccttctccttgaggcttctaaata

SEQ ID NO: 275809 - DNA, 25 bp, probe
tccttcacaactacggcgtttacac

SEQ ID NO: 275810 - DNA, 25 bp, probe
tccttcaaactcaggtttgtagcat

SEQ ID NO: 275811 - DNA, 25 bp, probe
tcctttacactctagtggtcgccca

SEQ ID NO: 275812 - DNA, 25 bp, probe
tcctttacactctagtggtcgccca

SEQ ID NO: 275813 - DNA, 25 bp, probe
tcctcattcctttattgggcgttca

SEQ ID NO: 275814 - DNA, 25 bp, probe
tccttccctttactgtggcattgga

SEQ ID NO: 275815 - DNA, 25 bp, probe
tccttctcactttgaattagttgta

SEQ ID NO: 275816 - DNA, 25 bp, probe
tccaggctcctttgaattacactga

SEQ ID NO: 275817 - DNA, 25 bp, probe
tccacgaccatgagaatggagccga

SEQ ID NO: 275818 - DNA, 25 bp, probe
tccaggcactgaaggaggcgtccga

SEQ ID NO: 275819 - DNA, 25 bp, probe
tccagctgccttaggaggagtcaca

SEQ ID NO: 275820 - DNA, 25 bp, probe
tccaggcgctacagcaggagtgcat

SEQ ID NO: 275821 - DNA, 25 bp, probe
tccagtgttggcagcaggaccctga

SEQ ID NO: 275822 - DNA, 25 bp, probe
tccaggtctgacaagaaagggccaa

SEQ ID NO: 275823 - DNA, 25 bp, probe
tccaggtctgacaagaaagggccaa

SEQ ID NO: 275824 - DNA, 25 bp, probe
tccaccgtgacattaaaggtgccaa

SEQ ID NO: 275825 - DNA, 25 bp, probe
tccacgccgaaaaatgaagtgcaca

SEQ ID NO: 275826 - DNA, 25 bp, probe
tccacgccgaaaaatgaagtgcaca

SEQ ID NO: 275827 - DNA, 25 bp, probe
tccaccatcctaaagatccagtcca

SEQ ID NO: 275828 - DNA, 25 bp, probe
tccaccatcttgaggatccagtcct

SEQ ID NO: 275829 - DNA, 25 bp, probe
tccaggcttctcagataccagccct

SEQ ID NO: 275830 - DNA, 25 bp, probe
tccagtcttcacagtatcaactgca

SEQ ID NO: 275831 - DNA, 25 bp, probe
tccagtcctgcaaggggcatagcca

SEQ ID NO: 275832 - DNA, 25 bp, probe
tccaggcgctggctggagcgcatgc

SEQ ID NO: 275833 - DNA, 25 bp, probe
tccagtgcctctcgatgtaggatga

SEQ ID NO: 275834 - DNA, 25 bp, probe
tccaggagctcaatgatgtcttcat

SEQ ID NO: 275835 - DNA, 25 bp, probe
tccaccaccaataatcatctcattg

SEQ ID NO: 275836 - DNA, 25 bp, probe
tccactcccatctttatgacatttc

SEQ ID NO: 275837 - DNA, 25 bp, probe
tccactcttgctctttcattagatt

SEQ ID NO: 275838 - DNA, 25 bp, probe
tccaccagtctgaaaggcataaatt

SEQ ID NO: 275839 - DNA, 25 bp, probe
tccaccagtctgaaaggcataaatt

SEQ ID NO: 275840 - DNA, 25 bp, probe
tcctccgtcctaagagtatcatctg

SEQ ID NO: 275841 - DNA, 25 bp, probe
tccactcactcagatccagtacata

SEQ ID NO: 275842 - DNA, 25 bp, probe
tccactcgcaaagcattgtgcactt

SEQ ID NO: 275843 - DNA, 25 bp, probe
tccatctccaaaatctctgagcatg

SEQ ID NO: 275844 - DNA, 25 bp, probe
tccagtgccaacaatcctagtgctt

SEQ ID NO: 275845 - DNA, 25 bp, probe
tccagtgccaacaatcctagtgctt

SEQ ID NO: 275846 - DNA, 25 bp, probe
tccagtcccaaagcacagttcttgg

SEQ ID NO: 275847 - DNA, 25 bp, probe
tccaggctcaaatatccagtgtctc

SEQ ID NO: 275848 - DNA, 25 bp, probe
tccggccaagcattgaccggaccca

SEQ ID NO: 275849 - DNA, 25 bp, probe
tccagggatcagtagttcctaccca

SEQ ID NO: 275850 - DNA, 25 bp, probe
tccagaggaagaagttccccccaga

SEQ ID NO: 275851 - DNA, 25 bp, probe
tcctaggaaactgtccagcctccta

SEQ ID NO: 275852 - DNA, 25 bp, probe
tcctaggaaactgtccagcctccta

SEQ ID NO: 275853 - DNA, 25 bp, probe
tcctaagaacttctccaacgacatc

SEQ ID NO: 275854 - DNA, 25 bp, probe
tcctaaaaatataaccaacaacagg

SEQ ID NO: 275855 - DNA, 25 bp, probe
tccagagaatttttacgcaagaaga

SEQ ID NO: 275856 - DNA, 25 bp, probe
tcccagatcttgcttaagaaatacc

SEQ ID NO: 275857 - DNA, 25 bp, probe
tccacctcatggcttaaggagaccc

SEQ ID NO: 275858 - DNA, 25 bp, probe
tccatcccaggacttaaggccctat

SEQ ID NO: 275859 - DNA, 25 bp, probe
tccacctcgagaaccaaggatactt

SEQ ID NO: 275860 - DNA, 25 bp, probe
tccacctctggtgctctgaggagat

SEQ ID NO: 275861 - DNA, 25 bp, probe
tccacctggcttcctatgaggagat

SEQ ID NO: 275862 - DNA, 25 bp, probe
tccacctggcttcctatgaggagat

SEQ ID NO: 275863 - DNA, 25 bp, probe
tccaccgagccaccaagaggcagca

SEQ ID NO: 275864 - DNA, 25 bp, probe
tccacctgtccagatgatgaggaga

SEQ ID NO: 275865 - DNA, 25 bp, probe
tcctattgtcgtgcatgtgggatgt

SEQ ID NO: 275866 - DNA, 25 bp, probe
tccttgccttgttgatgtggacatg

SEQ ID NO: 275867 - DNA, 25 bp, probe
tccttgcctttgaagggtatgtcac

SEQ ID NO: 275868 - DNA, 25 bp, probe
tcgcttccgttggtagcttgagtcc

SEQ ID NO: 275869 - DNA, 25 bp, probe
tcacttcaggaagttacttggttcc

SEQ ID NO: 275870 - DNA, 25 bp, probe
tacttcaatcttgttcggggaccac

SEQ ID NO: 275871 - DNA, 25 bp, probe
tccttttctggtttcgtgttcacca

SEQ ID NO: 275872 - DNA, 25 bp, probe
tccttttttgatgttctttcaccct

SEQ ID NO: 275873 - DNA, 25 bp, probe
tcctcttttgaggagtatttttcca

SEQ ID NO: 275874 - DNA, 25 bp, probe
tccattttggagggatccattttga

SEQ ID NO: 275875 - DNA, 25 bp, probe
tcgttcttactggcgtcaatcttcg

SEQ ID NO: 275876 - DNA, 25 bp, probe
tcctctcctacttggataactgtgg

SEQ ID NO: 275877 - DNA, 25 bp, probe
tcctacctaccgtctgaaatcatgt

SEQ ID NO: 275878 - DNA, 25 bp, probe
tcctacctaccgtctgaaatcatgt

SEQ ID NO: 275879 - DNA, 25 bp, probe
tcctccccaccctgaaaaaaatgag

SEQ ID NO: 275880 - DNA, 25 bp, probe
tccccctgaacctgaaacataaaat

SEQ ID NO: 275881 - DNA, 25 bp, probe
tccatcccaggcttttgaaaaacaa

SEQ ID NO: 275882 - DNA, 25 bp, probe
tctgacccaaatttagtcccagaaa

SEQ ID NO: 275883 - DNA, 25 bp, probe
tccaccaaacattatttcctctaaa

SEQ ID NO: 275884 - DNA, 25 bp, probe
tcctaatagaaattgatgttactaa

SEQ ID NO: 275885 - DNA, 25 bp, probe
tcctggaagattgaggttcctggac

SEQ ID NO: 275886 - DNA, 25 bp, probe
tccccagcacttgtagtgtccagtt

SEQ ID NO: 275887 - DNA, 25 bp, probe
tccaccagcattgagtatgtgacgc

SEQ ID NO: 275888 - DNA, 25 bp, probe
tccatctacctgcaggtgctgactg

SEQ ID NO: 275889 - DNA, 25 bp, probe
tccatcttcgtgcatgtggctgtca

SEQ ID NO: 275890 - DNA, 25 bp, probe
tccatggtagtcagtatggctcaac

SEQ ID NO: 275891 - DNA, 25 bp, probe
tcctattactcatgggtgtatacga

SEQ ID NO: 275892 - DNA, 25 bp, probe
tcctaaacacagcagggctttggag

SEQ ID NO: 275893 - DNA, 25 bp, probe
tccagataaatcccaagtgctttta

SEQ ID NO: 275894 - DNA, 25 bp, probe
tccagtacaatctcacaggggtcta

SEQ ID NO: 275895 - DNA, 25 bp, probe
tccagtgacttttcagagggtgctg

SEQ ID NO: 275896 - DNA, 25 bp, probe
tccagagcactgctccagtggggcc

SEQ ID NO: 275897 - DNA, 25 bp, probe
tccagagcactgctccagtggggcc

SEQ ID NO: 275898 - DNA, 25 bp, probe
tcctgcgtctggacctggctggccg

SEQ ID NO: 275899 - DNA, 25 bp, probe
tccagagatgcgcacctagtgagcc

SEQ ID NO: 275900 - DNA, 25 bp, probe
tccagagctgctcacggagaagtcc

SEQ ID NO: 275901 - DNA, 25 bp, probe
tccagaagtgcccggagaagcgcct

SEQ ID NO: 275902 - DNA, 25 bp, probe
tccagaagtgcccggagaagcgcct

SEQ ID NO: 275903 - DNA, 25 bp, probe
tccagaaggctctgcaggacacacc

SEQ ID NO: 275904 - DNA, 25 bp, probe
tccagaaggctctgcaggacacacc

SEQ ID NO: 275905 - DNA, 25 bp, probe
tccaggagcgcgtggtgtgcaacga

SEQ ID NO: 275906 - DNA, 25 bp, probe
tccagtggggatagtgatggcaact

SEQ ID NO: 275907 - DNA, 25 bp, probe
tccaggctgggaacatgctaggcac

SEQ ID NO: 275908 - DNA, 25 bp, probe
tccaggctgggaacatgctaggcac

SEQ ID NO: 275909 - DNA, 25 bp, probe
tccagggaggaagtcagagtgcagg

SEQ ID NO: 275910 - DNA, 25 bp, probe
tccaggaagtagtgcaggtgatcaa

SEQ ID NO: 275911 - DNA, 25 bp, probe
tccaggaagtagtgcaggtgatcaa

SEQ ID NO: 275912 - DNA, 25 bp, probe
tccaggaagtggtgcagtatatcaa

SEQ ID NO: 275913 - DNA, 25 bp, probe
tccagcaacatgagggaaataagca

SEQ ID NO: 275914 - DNA, 25 bp, probe
tccagcaacatttgggccagctaaa

SEQ ID NO: 275915 - DNA, 25 bp, probe
tccagcatcaagccagaggccagtc

SEQ ID NO: 275916 - DNA, 25 bp, probe
tccagaacagcgggagcactgtgct

SEQ ID NO: 275917 - DNA, 25 bp, probe
tccagacatgagcttgagcaggcag

SEQ ID NO: 275918 - DNA, 25 bp, probe
tccagtctgtgctatcagagcaagg

SEQ ID NO: 275919 - DNA, 25 bp, probe
tccagcttagcaacgcagaagagta

SEQ ID NO: 275920 - DNA, 25 bp, probe
tccacctagctgtagcagacacgct

SEQ ID NO: 275921 - DNA, 25 bp, probe
tccatcccaggctacaacaagctgt

SEQ ID NO: 275922 - DNA, 25 bp, probe
tccatcccaggctacaacaagctgt

SEQ ID NO: 275923 - DNA, 25 bp, probe
tcctccatcagagaaactggttttc

SEQ ID NO: 275924 - DNA, 25 bp, probe
tccttcacaggggacccgttgatat

SEQ ID NO: 275925 - DNA, 25 bp, probe
tccttctcaaggaatctcactctta

SEQ ID NO: 275926 - DNA, 25 bp, probe
tccatttcaaagacagcactttgaa

SEQ ID NO: 275927 - DNA, 25 bp, probe
tccatcatccaatgcatccacattt

SEQ ID NO: 275928 - DNA, 25 bp, probe
tccatcatccaatgcatccacattt

SEQ ID NO: 275929 - DNA, 25 bp, probe
tccatatcattgagaccaaatttga

SEQ ID NO: 275930 - DNA, 25 bp, probe
tccttatctgtgcagtacaggttgc

SEQ ID NO: 275931 - DNA, 25 bp, probe
tccattttggccatgtcacttgtgc

SEQ ID NO: 275932 - DNA, 25 bp, probe
tcctttcgatcgcatgttccagatc

SEQ ID NO: 275933 - DNA, 25 bp, probe
tccttgtgagacacttggcacagtt

SEQ ID NO: 275934 - DNA, 25 bp, probe
tccagatgttacaacgggcaggagc

SEQ ID NO: 275935 - DNA, 25 bp, probe
tccgcatttacaatgccgccagacc

SEQ ID NO: 275936 - DNA, 25 bp, probe
tcgtcatgtatacttacggcaacaa

SEQ ID NO: 275937 - DNA, 25 bp, probe
tcctggtaactcaaggctaccaagt

SEQ ID NO: 275938 - DNA, 25 bp, probe
tccttctccatcagaggctgggaaa

SEQ ID NO: 275939 - DNA, 25 bp, probe
tccttccagatcctgggtactgaaa

SEQ ID NO: 275940 - DNA, 25 bp, probe
tcctggccaactctcgtagtggaac

SEQ ID NO: 275941 - DNA, 25 bp, probe
tcctggccaactctcgtagtggaac

SEQ ID NO: 275942 - DNA, 25 bp, probe
tccatggaacctgacgtagctgcaa

SEQ ID NO: 275943 - DNA, 25 bp, probe
tccatgcttaccacagggaggcaag

SEQ ID NO: 275944 - DNA, 25 bp, probe
tccatgcttaccacagggaggcaag

SEQ ID NO: 275945 - DNA, 25 bp, probe
tccatctgccccaggacaagagcaa

SEQ ID NO: 275946 - DNA, 25 bp, probe
tccttgacacatgtggacaatggca

SEQ ID NO: 275947 - DNA, 25 bp, probe
tccttgacacatgtggacaatggca

SEQ ID NO: 275948 - DNA, 25 bp, probe
tccaggacagcacatgaaaaagccc

SEQ ID NO: 275949 - DNA, 25 bp, probe
tccattgtacataacaaaacagccc

SEQ ID NO: 275950 - DNA, 25 bp, probe
tccagtgatgatgtccaacaaactc

SEQ ID NO: 275951 - DNA, 25 bp, probe
tccagtgatgatgtccaacaaactc

SEQ ID NO: 275952 - DNA, 25 bp, probe
tccagaatgtttccgtgctacactt

SEQ ID NO: 275953 - DNA, 25 bp, probe
tccagaattgtcactgtgcattcaa

SEQ ID NO: 275954 - DNA, 25 bp, probe
tccagaattgtcactgtgcattcaa

SEQ ID NO: 275955 - DNA, 25 bp, probe
tccagatttgctctgcatgtggtaa

SEQ ID NO: 275956 - DNA, 25 bp, probe
tccatgcagtgtcttgctggcagat

SEQ ID NO: 275957 - DNA, 25 bp, probe
tccagcagctgtaattctcagagtt

SEQ ID NO: 275958 - DNA, 25 bp, probe
tccagcttgaacatctagaattcct

SEQ ID NO: 275959 - DNA, 25 bp, probe
tccagcttcataatttccatgatac

SEQ ID NO: 275960 - DNA, 25 bp, probe
tccagctcatcctttgacgctgtga

SEQ ID NO: 275961 - DNA, 25 bp, probe
tccagctcactccagatgacgatga

SEQ ID NO: 275962 - DNA, 25 bp, probe
tccagtatctcttatgactgtagtc

SEQ ID NO: 275963 - DNA, 25 bp, probe
tccattacattgtgctgcctcatgt

SEQ ID NO: 275964 - DNA, 25 bp, probe
tccagaaagcgctctgtctcatttg

SEQ ID NO: 275965 - DNA, 25 bp, probe
tccagacaaggagccaccagattgg

SEQ ID NO: 275966 - DNA, 25 bp, probe
tccagacaagaagcctaaggtgcag

SEQ ID NO: 275967 - DNA, 25 bp, probe
tccagaagctgatggcccagagtgg

SEQ ID NO: 275968 - DNA, 25 bp, probe
tccatctagcaagttcccaaaggca

SEQ ID NO: 275969 - DNA, 25 bp, probe
tcctctgagaatgaccaataaccaa

SEQ ID NO: 275970 - DNA, 25 bp, probe
tccttgatgcaaacacaactcagtt

SEQ ID NO: 275971 - DNA, 25 bp, probe
tccttacaaataaactgcaggtagg

SEQ ID NO: 275972 - DNA, 25 bp, probe
tccttcacgaacacagtggggaaga

SEQ ID NO: 275973 - DNA, 25 bp, probe
tccattgaaccacttcgggaaaaag

SEQ ID NO: 275974 - DNA, 25 bp, probe
tccttcatacaccttctgggtaggg

SEQ ID NO: 275975 - DNA, 25 bp, probe
tccatacaattctcttcagttagtg

SEQ ID NO: 275976 - DNA, 25 bp, probe
tccagaagtgcagcctttgttattg

SEQ ID NO: 275977 - DNA, 25 bp, probe
tccagaatgtcctctgcttggtcaa

SEQ ID NO: 275978 - DNA, 25 bp, probe
tccagagatgtcttccttgtaggaa

SEQ ID NO: 275979 - DNA, 25 bp, probe
tccagagatgtcttccttgtaggaa

SEQ ID NO: 275980 - DNA, 25 bp, probe
tccagagatgtctacagcacggatt

SEQ ID NO: 275981 - DNA, 25 bp, probe
tccagatgagtcaataccgttccat

SEQ ID NO: 275982 - DNA, 25 bp, probe
tccagcatgaaaacacgtttacagg

SEQ ID NO: 275983 - DNA, 25 bp, probe
tccagagaatgaaccttttgatgaa

SEQ ID NO: 275984 - DNA, 25 bp, probe
tccaggcatagcagttctttagcca

SEQ ID NO: 275985 - DNA, 25 bp, probe
tccatgggagctttctttctgactc

SEQ ID NO: 275986 - DNA, 25 bp, probe
tccatcggattgttctttcttcata

SEQ ID NO: 275987 - DNA, 25 bp, probe
tccagggcttcattgttgccatcct

SEQ ID NO: 275988 - DNA, 25 bp, probe
tccagcttttcatgtttcaactttt

SEQ ID NO: 275989 - DNA, 25 bp, probe
tcacaattttattggatcccttttt

SEQ ID NO: 275990 - DNA, 25 bp, probe
tccttaataattggaccttttgatt

SEQ ID NO: 275991 - DNA, 25 bp, probe
tccattgttgagtgaagcgtatttg

SEQ ID NO: 275992 - DNA, 25 bp, probe
tccattgttgagtgaagcgtatttg

SEQ ID NO: 275993 - DNA, 25 bp, probe
tccattggggacgggcagtacaagc

SEQ ID NO: 275994 - DNA, 25 bp, probe
tccatgcgggagttggggttgctca

SEQ ID NO: 275995 - DNA, 25 bp, probe
tccagggcgcaggggagggtgcggc

SEQ ID NO: 275996 - DNA, 25 bp, probe
tccatggggacagaaccgtcactca

SEQ ID NO: 275997 - DNA, 25 bp, probe
tcctcgtgagtaggaaccctgtctc

SEQ ID NO: 275998 - DNA, 25 bp, probe
tccttcttggaagactacttcactg

SEQ ID NO: 275999 - DNA, 25 bp, probe
tccttggttgcaactactactacaa

SEQ ID NO: 276000 - DNA, 25 bp, probe
tccttgggattggtgacagacatag

SEQ ID NO: 276001 - DNA, 25 bp, probe
tccttgggatttggcctggatacag

SEQ ID NO: 276002 - DNA, 25 bp, probe
tccttggtgattccgcagtgagaga

SEQ ID NO: 276003 - DNA, 25 bp, probe
tcctttagatttcctggtgaagtcc

SEQ ID NO: 276004 - DNA, 25 bp, probe
tcccttatgagatccacctaaggcc

SEQ ID NO: 276005 - DNA, 25 bp, probe
tcctcattaagaactcctgtaaacc

SEQ ID NO: 276006 - DNA, 25 bp, probe
tcctcattataaacagcagcgccaa

SEQ ID NO: 276007 - DNA, 25 bp, probe
tccttttttcagttcaccaagttgg

SEQ ID NO: 276008 - DNA, 25 bp, probe
tcctttgtttcaccaaccagttata

SEQ ID NO: 276009 - DNA, 25 bp, probe
tccgtaggtctcagcaacagcgtgt

SEQ ID NO: 276010 - DNA, 25 bp, probe
tccaggaagttcaggtcgccatcat

SEQ ID NO: 276011 - DNA, 25 bp, probe
tccagaagggctactttccacatat

SEQ ID NO: 276012 - DNA, 25 bp, probe
tccaggagggcttcatcctcataat

SEQ ID NO: 276013 - DNA, 25 bp, probe
tccaggatggatgcatcacactcaa

SEQ ID NO: 276014 - DNA, 25 bp, probe
tccagagatggtcacatgacccagg

SEQ ID NO: 276015 - DNA, 25 bp, probe
tccagttgttcatcaacccatggtg

SEQ ID NO: 276016 - DNA, 25 bp, probe
tccagttgttcatcaacccatggtg

SEQ ID NO: 276017 - DNA, 25 bp, probe
tccagtgtgcgttggaatcacctgg

SEQ ID NO: 276018 - DNA, 25 bp, probe
tccagatgatcgtggtggatggggt

SEQ ID NO: 276019 - DNA, 25 bp, probe
tccagctagagcttcggggggatgt

SEQ ID NO: 276020 - DNA, 25 bp, probe
tccagcttgctcttcagtgggagaa

SEQ ID NO: 276021 - DNA, 25 bp, probe
tccagctgtttgtcaaggcgagtga

SEQ ID NO: 276022 - DNA, 25 bp, probe
tccatcttctctccgaggttgtgaa

SEQ ID NO: 276023 - DNA, 25 bp, probe
tcctctatttcctggagtcatgtga

SEQ ID NO: 276024 - DNA, 25 bp, probe
tcctccttcccatgggcatcatggg

SEQ ID NO: 276025 - DNA, 25 bp, probe
tccatccttgcatcactggggagga

SEQ ID NO: 276026 - DNA, 25 bp, probe
tccatccaggcactgaaggaggcgt

SEQ ID NO: 276027 - DNA, 25 bp, probe
tccagggtgcagtacagcagggcct

SEQ ID NO: 276028 - DNA, 25 bp, probe
tccagggccagatgagcagaagctc

SEQ ID NO: 276029 - DNA, 25 bp, probe
tccagtgcccagggcgcatgtatgc

SEQ ID NO: 276030 - DNA, 25 bp, probe
tccatgatgcccgggcagcacatgc

SEQ ID NO: 276031 - DNA, 25 bp, probe
tccatgatcctagtggcgcgagctt

SEQ ID NO: 276032 - DNA, 25 bp, probe
tccatgagattattggctcaggttc

SEQ ID NO: 276033 - DNA, 25 bp, probe
tccagaactagacgccatggctgca

SEQ ID NO: 276034 - DNA, 25 bp, probe
tccagaatggagagcagcagttcac

SEQ ID NO: 276035 - DNA, 25 bp, probe
tccagattgtgagccagcaatgtca

SEQ ID NO: 276036 - DNA, 25 bp, probe
tccagtgcttgaatatcagcgtgct

SEQ ID NO: 276037 - DNA, 25 bp, probe
tccagtgagcttatcatgctgtctt

SEQ ID NO: 276038 - DNA, 25 bp, probe
tccagtgacattgatcctcatctcc

SEQ ID NO: 276039 - DNA, 25 bp, probe
tccagtgagaagacctgctcctcag

SEQ ID NO: 276040 - DNA, 25 bp, probe
tccagtatgaaaagctatcttaaaa

SEQ ID NO: 276041 - DNA, 25 bp, probe
tccatgtgaaagatctcattaagaa

SEQ ID NO: 276042 - DNA, 25 bp, probe
tccagtgtagcagatctctatataa

SEQ ID NO: 276043 - DNA, 25 bp, probe
tccatgtgcccaggattatattagc

SEQ ID NO: 276044 - DNA, 25 bp, probe
tccatgtctctgagcattagatttc

SEQ ID NO: 276045 - DNA, 25 bp, probe
tccagttcctggaacaggttcacca

SEQ ID NO: 276046 - DNA, 25 bp, probe
tccaggacctggaaaggtgcaaaga

SEQ ID NO: 276047 - DNA, 25 bp, probe
tccatggggcgtggcaagggaatag

SEQ ID NO: 276048 - DNA, 25 bp, probe
tccggagatggtgaagggagaaccc

SEQ ID NO: 276049 - DNA, 25 bp, probe
tccggcctgacgcacaggcggaagc

SEQ ID NO: 276050 - DNA, 25 bp, probe
tccaggcccctgcacaagaagaaga

SEQ ID NO: 276051 - DNA, 25 bp, probe
tccgtgaacctgctgaagaggcaga

SEQ ID NO: 276052 - DNA, 25 bp, probe
tccagtggtccatggaatgcttgaa

SEQ ID NO: 276053 - DNA, 25 bp, probe
tccagtggatccaagtactctctct

SEQ ID NO: 276054 - DNA, 25 bp, probe
tccagtgtgacccagataattctga

SEQ ID NO: 276055 - DNA, 25 bp, probe
tccagtgtgacccagataattctga

SEQ ID NO: 276056 - DNA, 25 bp, probe
tccagagtcacccaaagcatcctgg

SEQ ID NO: 276057 - DNA, 25 bp, probe
tccagatgtccttctaggctcaaca

SEQ ID NO: 276058 - DNA, 25 bp, probe
tccagatgtccttctaggctcaaca

SEQ ID NO: 276059 - DNA, 25 bp, probe
tccagtgacctgtcaaggcttatgc

SEQ ID NO: 276060 - DNA, 25 bp, probe
tccatgttcaattcaaggttatctg

SEQ ID NO: 276061 - DNA, 25 bp, probe
tccttatgcacttccagggtctttt

SEQ ID NO: 276062 - DNA, 25 bp, probe
tccatgctataatccagtggtgcct

SEQ ID NO: 276063 - DNA, 25 bp, probe
tccaggagcaagtcctgtgtggcaa

SEQ ID NO: 276064 - DNA, 25 bp, probe
tccttggcaatgcatttgatggcca

SEQ ID NO: 276065 - DNA, 25 bp, probe
tccattgtgtggcctggtgggtcag

SEQ ID NO: 276066 - DNA, 25 bp, probe
tcctgtgtggggcacatgccttgga

SEQ ID NO: 276067 - DNA, 25 bp, probe
tcctagggtgaagcagacttgtcag

SEQ ID NO: 276068 - DNA, 25 bp, probe
tcctagggtacagtctactagtgaa

SEQ ID NO: 276069 - DNA, 25 bp, probe
tcctaggtgctaggtggaccgagca

SEQ ID NO: 276070 - DNA, 25 bp, probe
tccttctgttggcagtgacggtgca

SEQ ID NO: 276071 - DNA, 25 bp, probe
tccatgtctgtttgtaggacggaga

SEQ ID NO: 276072 - DNA, 25 bp, probe
tccatgcctgttttacagaaacaca

SEQ ID NO: 276073 - DNA, 25 bp, probe
tccatcgctgtcatctcagctggat

SEQ ID NO: 276074 - DNA, 25 bp, probe
tccatcagccatttccatctggcac

SEQ ID NO: 276075 - DNA, 25 bp, probe
tccatggcatcagtatacctgagcc

SEQ ID NO: 276076 - DNA, 25 bp, probe
tccaggaacatctactcagcagact

SEQ ID NO: 276077 - DNA, 25 bp, probe
tccagttctacttccagcagaaggg

SEQ ID NO: 276078 - DNA, 25 bp, probe
tccagttcccattcaacagagtagg

SEQ ID NO: 276079 - DNA, 25 bp, probe
tccatgtccccagaaatgatggcag

SEQ ID NO: 276080 - DNA, 25 bp, probe
tccataactccagacatcactggca

SEQ ID NO: 276081 - DNA, 25 bp, probe
tccataactccagacatcactggca

SEQ ID NO: 276082 - DNA, 25 bp, probe
tccaggattcacggtgcacatgctg

SEQ ID NO: 276083 - DNA, 25 bp, probe
tccatggaccacgtgtgccttggtc

SEQ ID NO: 276084 - DNA, 25 bp, probe
tccatggaccacgtgtgccttggtc

SEQ ID NO: 276085 - DNA, 25 bp, probe
tccatgtacacgctgtccagggagc

SEQ ID NO: 276086 - DNA, 25 bp, probe
tccatgccataccacttgtcagggc

SEQ ID NO: 276087 - DNA, 25 bp, probe
tccttgcatgagccacagttcaggg

SEQ ID NO: 276088 - DNA, 25 bp, probe
tcctagtacatccagctctcagtgg

SEQ ID NO: 276089 - DNA, 25 bp, probe
tcctttaatcttcccagcaggtttt

SEQ ID NO: 276090 - DNA, 25 bp, probe
tcctattgaaacttgcccagatgtt

SEQ ID NO: 276091 - DNA, 25 bp, probe
tcctattaaagaacctcgtcccagt

SEQ ID NO: 276092 - DNA, 25 bp, probe
tccttcttagaagcttcgaactcaa

SEQ ID NO: 276093 - DNA, 25 bp, probe
tccttcttagtttgcttgtggcctc

SEQ ID NO: 276094 - DNA, 25 bp, probe
tccttttagcctagttcatccaatc

SEQ ID NO: 276095 - DNA, 25 bp, probe
tccatcttttccatgatgcttccaa

SEQ ID NO: 276096 - DNA, 25 bp, probe
tccagatgttatgctcctgctgatc

SEQ ID NO: 276097 - DNA, 25 bp, probe
tccagatgttatgctcctgctgatc

SEQ ID NO: 276098 - DNA, 25 bp, probe
tccaggattcatggtgcctctgttg

SEQ ID NO: 276099 - DNA, 25 bp, probe
tccaggcactatgttctctgaagaa

SEQ ID NO: 276100 - DNA, 25 bp, probe
tcctgggctatattcctgacaaaag

SEQ ID NO: 276101 - DNA, 25 bp, probe
tcctaggcacagttcttcagaaaac

SEQ ID NO: 276102 - DNA, 25 bp, probe
tcccataccgacatctacaactaat

SEQ ID NO: 276103 - DNA, 25 bp, probe
tcccataccgacatctacaactaat

SEQ ID NO: 276104 - DNA, 25 bp, probe
tccgtctacgacttgggcaacaaca

SEQ ID NO: 276105 - DNA, 25 bp, probe
tccgacaacaccgtgtccaaaaagg

SEQ ID NO: 276106 - DNA, 25 bp, probe
tccgaaaacacccatccaagcaggg

SEQ ID NO: 276107 - DNA, 25 bp, probe
tcctggattaaggcgatccggcggc

SEQ ID NO: 276108 - DNA, 25 bp, probe
tccatggttacgtcagtcgtgtgca

SEQ ID NO: 276109 - DNA, 25 bp, probe
tccatggttacgtcagtcgtgtgca

SEQ ID NO: 276110 - DNA, 25 bp, probe
tccatggtttcagaaagcattcaag

SEQ ID NO: 276111 - DNA, 25 bp, probe
tccatggccttcaaaaacattgcct

SEQ ID NO: 276112 - DNA, 25 bp, probe
tccagtccttcgtcaaagactgcct

SEQ ID NO: 276113 - DNA, 25 bp, probe
tctcttccagctgctaaaaggcctc

SEQ ID NO: 276114 - DNA, 25 bp, probe
tccatttcagcagctcaaacaggtg

SEQ ID NO: 276115 - DNA, 25 bp, probe
tccatcttcagctctcagaaattga

SEQ ID NO: 276116 - DNA, 25 bp, probe
tccatcatatagttcaaccatgatt

SEQ ID NO: 276117 - DNA, 25 bp, probe
tcctcagatgggaattgcacagtag

SEQ ID NO: 276118 - DNA, 25 bp, probe
tcctcaagatggattcctgagcgaa

SEQ ID NO: 276119 - DNA, 25 bp, probe
tcctcaagatggattcctgagcgaa

SEQ ID NO: 276120 - DNA, 25 bp, probe
tcctgaagctgtcatgttctgacac

SEQ ID NO: 276121 - DNA, 25 bp, probe
tccagatactgctcagccttgatga

SEQ ID NO: 276122 - DNA, 25 bp, probe
tccatgataggacagacttctgaaa

SEQ ID NO: 276123 - DNA, 25 bp, probe
tccatgtggccgcctactttggcca

SEQ ID NO: 276124 - DNA, 25 bp, probe
tcctcatgggcatctactttgtgct

SEQ ID NO: 276125 - DNA, 25 bp, probe
tccttgcagtgcgccaagttgctgc

SEQ ID NO: 276126 - DNA, 25 bp, probe
tccttgcagtgcgccaagttgctgc

SEQ ID NO: 276127 - DNA, 25 bp, probe
tccttgcaggtgggggttgctgtat

SEQ ID NO: 276128 - DNA, 25 bp, probe
tccgttgccatatgggtggtgtgga

SEQ ID NO: 276129 - DNA, 25 bp, probe
tcctgtggccaatctagtcctggaa

SEQ ID NO: 276130 - DNA, 25 bp, probe
tcctggtcctgtgctggattctgaa

SEQ ID NO: 276131 - DNA, 25 bp, probe
tcctaacctgcaggcagaacctgaa

SEQ ID NO: 276132 - DNA, 25 bp, probe
tccttacctattccaacctaatgat

SEQ ID NO: 276133 - DNA, 25 bp, probe
tacttacagaaaccaacctttgcat

SEQ ID NO: 276134 - DNA, 25 bp, probe
tcctttcagaactcatatcagttta

SEQ ID NO: 276135 - DNA, 25 bp, probe
tcctttcagaactcatatcagttta

SEQ ID NO: 276136 - DNA, 25 bp, probe
tccttttagtattcttagttgttca

SEQ ID NO: 276137 - DNA, 25 bp, probe
tcctttcttttacaaattgtgctga

SEQ ID NO: 276138 - DNA, 25 bp, probe
tctccttcttgctgaccaaaagtct

SEQ ID NO: 276139 - DNA, 25 bp, probe
tctccttcttgctgaccaaaagtct

SEQ ID NO: 276140 - DNA, 25 bp, probe
tcctcttttccaagtcaaaaagctt

SEQ ID NO: 276141 - DNA, 25 bp, probe
tcctcttttccaagtcaaaaagctt

SEQ ID NO: 276142 - DNA, 25 bp, probe
tcacctctttccacttaaacgtgtc

SEQ ID NO: 276143 - DNA, 25 bp, probe
tccttctttcttcctctacagaagt

SEQ ID NO: 276144 - DNA, 25 bp, probe
tccatcctttttgttatatgggata

SEQ ID NO: 276145 - DNA, 25 bp, probe
tccttttcttactctatagtggcaa

SEQ ID NO: 276146 - DNA, 25 bp, probe
tccatattccttctgcctatattta

SEQ ID NO: 276147 - DNA, 25 bp, probe
tcttaagacggtggccaaattaaag

SEQ ID NO: 276148 - DNA, 25 bp, probe
tcctaatgacgcggctcaaaaggaa

SEQ ID NO: 276149 - DNA, 25 bp, probe
tcctcattctctccctaataaaaat

SEQ ID NO: 276150 - DNA, 25 bp, probe
tcctcattctctccctaataaaaat

SEQ ID NO: 276151 - DNA, 25 bp, probe
tcctttcccgcctaagcagtgaaaa

SEQ ID NO: 276152 - DNA, 25 bp, probe
tccttctgcccaagtaaagtgacca

SEQ ID NO: 276153 - DNA, 25 bp, probe
tccttctggcgcaagagaacatttc

SEQ ID NO: 276154 - DNA, 25 bp, probe
tccattgtgaccagcagcaggcttt

SEQ ID NO: 276155 - DNA, 25 bp, probe
tccatctacaccacagcaagtgcta

SEQ ID NO: 276156 - DNA, 25 bp, probe
tccagtacacatcgtatggggtgac

SEQ ID NO: 276157 - DNA, 25 bp, probe
tccatgtacacgctcagcagggacc

SEQ ID NO: 276158 - DNA, 25 bp, probe
tccatcgagacctatgagcaggaga

SEQ ID NO: 276159 - DNA, 25 bp, probe
tccatcgagacctatgagcaggaga

SEQ ID NO: 276160 - DNA, 25 bp, probe
tccatggagcatccttctccgatag

SEQ ID NO: 276161 - DNA, 25 bp, probe
tccagggctccaaatctgcctagaa

SEQ ID NO: 276162 - DNA, 25 bp, probe
tccagttgcactattctgagggaaa

SEQ ID NO: 276163 - DNA, 25 bp, probe
tccatttgcctttctgggagcagaa

SEQ ID NO: 276164 - DNA, 25 bp, probe
tccagggccgcgtgtggatgcagaa

SEQ ID NO: 276165 - DNA, 25 bp, probe
tcctagagccagcctcagttgatgc

SEQ ID NO: 276166 - DNA, 25 bp, probe
tcctatatccagtaagtagaattat

SEQ ID NO: 276167 - DNA, 25 bp, probe
tccatacagccttggactagcaatt

SEQ ID NO: 276168 - DNA, 25 bp, probe
tcgaaaactcagcaatggcagatta

SEQ ID NO: 276169 - DNA, 25 bp, probe
tccttaactgcacgatattcagatt

SEQ ID NO: 276170 - DNA, 25 bp, probe
tcctgttttcatctagtcagagatt

SEQ ID NO: 276171 - DNA, 25 bp, probe
tccttttagactcaccagagatatt

SEQ ID NO: 276172 - DNA, 25 bp, probe
tcctctttgaacactcaagatgcat

SEQ ID NO: 276173 - DNA, 25 bp, probe
tccatttttcaccctacatgaatcc

SEQ ID NO: 276174 - DNA, 25 bp, probe
tccatggctttgggacatttacatc

SEQ ID NO: 276175 - DNA, 25 bp, probe
tccaggatccatgggagcattctca

SEQ ID NO: 276176 - DNA, 25 bp, probe
tccagattctgaaaggatcctcatg

SEQ ID NO: 276177 - DNA, 25 bp, probe
tccatattgctatagtacttctgta

SEQ ID NO: 276178 - DNA, 25 bp, probe
tcctattgccttttccttttggcta

SEQ ID NO: 276179 - DNA, 25 bp, probe
tcctgatacctgcttactttctgga

SEQ ID NO: 276180 - DNA, 25 bp, probe
tcctttcctagttatttggctggtt

SEQ ID NO: 276181 - DNA, 25 bp, probe
tccttttcaatctcattgtcactgg

SEQ ID NO: 276182 - DNA, 25 bp, probe
tccttgttctactcatatatatcta

SEQ ID NO: 276183 - DNA, 25 bp, probe
tcctttttcgatcattcaatgcata

SEQ ID NO: 276184 - DNA, 25 bp, probe
tccattttgatcctttgtactctat

SEQ ID NO: 276185 - DNA, 25 bp, probe
tccattttgcaaatgctgctccacc

SEQ ID NO: 276186 - DNA, 25 bp, probe
tcctttgatgacatgtcctgcatct

SEQ ID NO: 276187 - DNA, 25 bp, probe
tcctatatgtaatgatcattatcga

SEQ ID NO: 276188 - DNA, 25 bp, probe
tcctccagtacacatcgtatggggt

SEQ ID NO: 276189 - DNA, 25 bp, probe
tccttgcaggagcgtcagttgcggg

SEQ ID NO: 276190 - DNA, 25 bp, probe
tccattgcagcgcgggcgttggaag

SEQ ID NO: 276191 - DNA, 25 bp, probe
tccatatcctggcggttgaaaagtt

SEQ ID NO: 276192 - DNA, 25 bp, probe
tccatcattcatctgggtggaaatg

SEQ ID NO: 276193 - DNA, 25 bp, probe
tccatcattcatctgggtggaaatg

SEQ ID NO: 276194 - DNA, 25 bp, probe
tcctcatcatcacggggtgaaggtc

SEQ ID NO: 276195 - DNA, 25 bp, probe
tccatcctgccggatgagtgtgggt

SEQ ID NO: 276196 - DNA, 25 bp, probe
tcctcagccactcgtggctgcagcc

SEQ ID NO: 276197 - DNA, 25 bp, probe
tcctagaactggaagctgtccaccc

SEQ ID NO: 276198 - DNA, 25 bp, probe
tcctgatacctataagttcaccccc

SEQ ID NO: 276199 - DNA, 25 bp, probe
tcctgaccctactgtagtcactacc

SEQ ID NO: 276200 - DNA, 25 bp, probe
tcctaacttcactgtattctttact

SEQ ID NO: 276201 - DNA, 25 bp, probe
tcctgaacccacaaattattcttac

SEQ ID NO: 276202 - DNA, 25 bp, probe
tcctaaagccaaagtttctgttgaa

SEQ ID NO: 276203 - DNA, 25 bp, probe
tcctaaagccaaagtttctgttgaa

SEQ ID NO: 276204 - DNA, 25 bp, probe
tcctaaaggagatgtaatcagtgta

SEQ ID NO: 276205 - DNA, 25 bp, probe
tccttggagaggaagtaatcaacct

SEQ ID NO: 276206 - DNA, 25 bp, probe
tccgtagagaggacgtccacaacca

SEQ ID NO: 276207 - DNA, 25 bp, probe
tccgtcaagctggttgtccactaaa

SEQ ID NO: 276208 - DNA, 25 bp, probe
tccgtcaagctggttgtccactaaa

SEQ ID NO: 276209 - DNA, 25 bp, probe
tccgccaagcatatggctccatttt

SEQ ID NO: 276210 - DNA, 25 bp, probe
tccccaaacttgctgtcaattccga

SEQ ID NO: 276211 - DNA, 25 bp, probe
tccctaaacttgcttcagttatagt

SEQ ID NO: 276212 - DNA, 25 bp, probe
tccttaaagttgttctcccaagagc

SEQ ID NO: 276213 - DNA, 25 bp, probe
tccttgacaactttatcagccagac

SEQ ID NO: 276214 - DNA, 25 bp, probe
tccttgacaactttatcagccagac

SEQ ID NO: 276215 - DNA, 25 bp, probe
tccatgtccagaaccttagccaggt

SEQ ID NO: 276216 - DNA, 25 bp, probe
tcctgctccatgagctcttatgcca

SEQ ID NO: 276217 - DNA, 25 bp, probe
tcctgctccatgagctcttatgcca

SEQ ID NO: 276218 - DNA, 25 bp, probe
tcctgctccatgagctcttatgcca

SEQ ID NO: 276219 - DNA, 25 bp, probe
tccatcgtctacgttatctgcatca

SEQ ID NO: 276220 - DNA, 25 bp, probe
tccatcttcacactggtttgccagg

SEQ ID NO: 276221 - DNA, 25 bp, probe
tccatcttacattagtgattccatc

SEQ ID NO: 276222 - DNA, 25 bp, probe
tccatgttgcaataggttctctttg

SEQ ID NO: 276223 - DNA, 25 bp, probe
tccttcactgaagggttctccttcg

SEQ ID NO: 276224 - DNA, 25 bp, probe
tccttcccaaggattccgctttgga

SEQ ID NO: 276225 - DNA, 25 bp, probe
tcctacccatagtctttgtgtgctt

SEQ ID NO: 276226 - DNA, 25 bp, probe
tcctttccaataattgactggtgga

SEQ ID NO: 276227 - DNA, 25 bp, probe
tccccttcaacaaggtcatggtggc

SEQ ID NO: 276228 - DNA, 25 bp, probe
tccgccttaatctggaaggcccctc

SEQ ID NO: 276229 - DNA, 25 bp, probe
tccgcctcttaagggacaccctaat

SEQ ID NO: 276230 - DNA, 25 bp, probe
tcctcttcatgtgatgtggacccct

SEQ ID NO: 276231 - DNA, 25 bp, probe
tcctcactgactatgtgccaacgcc

SEQ ID NO: 276232 - DNA, 25 bp, probe
tccatcacaatcttttgctttcgcc

SEQ ID NO: 276233 - DNA, 25 bp, probe
tccatgccaggatatttttccgcaa

SEQ ID NO: 276234 - DNA, 25 bp, probe
tccatagggaaaggcttctctccaa

SEQ ID NO: 276235 - DNA, 25 bp, probe
tcctttgggcgagtgccttatccaa

SEQ ID NO: 276236 - DNA, 25 bp, probe
tcctttgggcgagtgccttatccaa

SEQ ID NO: 276237 - DNA, 25 bp, probe
tccttttgggctgcatgctattcca

SEQ ID NO: 276238 - DNA, 25 bp, probe
tccttttgggctgcatgctattcca

SEQ ID NO: 276239 - DNA, 25 bp, probe
tccttttctagtgtgagtttcaggt

SEQ ID NO: 276240 - DNA, 25 bp, probe
tccttttccagttcagtatttggag

SEQ ID NO: 276241 - DNA, 25 bp, probe
tcctgctttctctttcagtattaaa

SEQ ID NO: 276242 - DNA, 25 bp, probe
tccttttgctgtctttctctaaata

SEQ ID NO: 276243 - DNA, 25 bp, probe
tccttggtgttgctttctccaaatg

SEQ ID NO: 276244 - DNA, 25 bp, probe
tccttggtgtctcacttcaactgtg

SEQ ID NO: 276245 - DNA, 25 bp, probe
tcctatggttcgaagttttgctgtt

SEQ ID NO: 276246 - DNA, 25 bp, probe
tcctcaggtcttcagtcctggggat

SEQ ID NO: 276247 - DNA, 25 bp, probe
tcctaggtaggggtggctggggcag

SEQ ID NO: 276248 - DNA, 25 bp, probe
tccagggtcagtccctggatgggtg

SEQ ID NO: 276249 - DNA, 25 bp, probe
tccagggcaggaccttggagggagg

SEQ ID NO: 276250 - DNA, 25 bp, probe
tccaggtgcaggagggcgagggcca

SEQ ID NO: 276251 - DNA, 25 bp, probe
tccaggtggtgcagggcaacgcaga

SEQ ID NO: 276252 - DNA, 25 bp, probe
tccaggtggtagagctgcccagtgg

SEQ ID NO: 276253 - DNA, 25 bp, probe
tccgctggggaagatgccgcgggcg

SEQ ID NO: 276254 - DNA, 25 bp, probe
tccgctggggaagatgccgcgggcg

SEQ ID NO: 276255 - DNA, 25 bp, probe
tccatgctgggggaccgtggggaga

SEQ ID NO: 276256 - DNA, 25 bp, probe
tcctttgggagaccaatgtgggaca

SEQ ID NO: 276257 - DNA, 25 bp, probe
tcctgtggcgggtgaatctcgtgta

SEQ ID NO: 276258 - DNA, 25 bp, probe
tcctttctggtgtggattattgtca

SEQ ID NO: 276259 - DNA, 25 bp, probe
tccttttggttcctcacatattatt

SEQ ID NO: 276260 - DNA, 25 bp, probe
tccatttctggaccactccatattt

SEQ ID NO: 276261 - DNA, 25 bp, probe
tccattcttgcttgactctactatt

SEQ ID NO: 276262 - DNA, 25 bp, probe
tccttcttcctgactccaccatgtg

SEQ ID NO: 276263 - DNA, 25 bp, probe
tccttgctctcctacaatattcagt

SEQ ID NO: 276264 - DNA, 25 bp, probe
tcctgatgccctgacatcatcattc

SEQ ID NO: 276265 - DNA, 25 bp, probe
tccatgttcttgggcaacagtccag

SEQ ID NO: 276266 - DNA, 25 bp, probe
tccatttagctggccaatcagccca

SEQ ID NO: 276267 - DNA, 25 bp, probe
tccatggtaggagtcaatctgccac

SEQ ID NO: 276268 - DNA, 25 bp, probe
tccatgactttgcgcaagcatcaca

SEQ ID NO: 276269 - DNA, 25 bp, probe
tcctgactggtgctgcagcaccgag

SEQ ID NO: 276270 - DNA, 25 bp, probe
tcctgatggaggctccacactagat

SEQ ID NO: 276271 - DNA, 25 bp, probe
tccattcagaagttccatcactaga

SEQ ID NO: 276272 - DNA, 25 bp, probe
tccatctcaagggatcaacccaagt

SEQ ID NO: 276273 - DNA, 25 bp, probe
tccttcaagatcatgtaccccaatt

SEQ ID NO: 276274 - DNA, 25 bp, probe
tccttaagatcatgggttctgactt

SEQ ID NO: 276275 - DNA, 25 bp, probe
tccttaggtcttggccattctagtg

SEQ ID NO: 276276 - DNA, 25 bp, probe
ttttgggtttggccagggaggcgca

SEQ ID NO: 276277 - DNA, 25 bp, probe
ttttgacttttacaggtaagtgcaa

SEQ ID NO: 276278 - DNA, 25 bp, probe
taacgtattttagcaggtggagtga

SEQ ID NO: 276279 - DNA, 25 bp, probe
tctgacttacttaaccaggtttggg

SEQ ID NO: 276280 - DNA, 25 bp, probe
tctgacttacttaaccaggtttggg

SEQ ID NO: 276281 - DNA, 25 bp, probe
tttcttccttcagacggttttggat

SEQ ID NO: 276282 - DNA, 25 bp, probe
tcctgttcttaagacgtgattttgc

SEQ ID NO: 276283 - DNA, 25 bp, probe
tccgagtctttttagtgtttttgca

SEQ ID NO: 276284 - DNA, 25 bp, probe
tccgagtctttttagtgtttttgca

SEQ ID NO: 276285 - DNA, 25 bp, probe
tcctatttttcatgagtggtttctg

SEQ ID NO: 276286 - DNA, 25 bp, probe
tccttttttctgtttgcactgtttg

SEQ ID NO: 276287 - DNA, 25 bp, probe
tccttttgtgttctgtcaccaactg

SEQ ID NO: 276288 - DNA, 25 bp, probe
tccatttttttcctgtgcctaacag

SEQ ID NO: 276289 - DNA, 25 bp, probe
tccttctgtccatcgtgggtaacag

SEQ ID NO: 276290 - DNA, 25 bp, probe
tccttgagtgcctcagtggtggcga

SEQ ID NO: 276291 - DNA, 25 bp, probe
tccttggatcgtccactgggaccaa

SEQ ID NO: 276292 - DNA, 25 bp, probe
tcctttattcatttctgggacagaa

SEQ ID NO: 276293 - DNA, 25 bp, probe
tcctcttgatttgtctgggttaaaa

SEQ ID NO: 276294 - DNA, 25 bp, probe
tccttccttatcatgctgggtacaa

SEQ ID NO: 276295 - DNA, 25 bp, probe
tccttttttaggcctgaatacaaag

SEQ ID NO: 276296 - DNA, 25 bp, probe
tccttttttatgcttagaacaccag

SEQ ID NO: 276297 - DNA, 25 bp, probe
tccttttttatgcttagaacaccag

SEQ ID NO: 276298 - DNA, 25 bp, probe
tcctttcatacgtctttattaccca

SEQ ID NO: 276299 - DNA, 25 bp, probe
tcctttgaggggtctgtttaggcca

SEQ ID NO: 276300 - DNA, 25 bp, probe
tcctttggagtccttctttgggaga

SEQ ID NO: 276301 - DNA, 25 bp, probe
tccattctgggtgttttcagaaaga

SEQ ID NO: 276302 - DNA, 25 bp, probe
tcctgttaggtgcttcgtctgaaag

SEQ ID NO: 276303 - DNA, 25 bp, probe
tcctttagggatctagctcttcgag

SEQ ID NO: 276304 - DNA, 25 bp, probe
tctcggtactggtgctagtcttttt

SEQ ID NO: 276305 - DNA, 25 bp, probe
tccatttcttggttttgtattgttt

SEQ ID NO: 276306 - DNA, 25 bp, probe
tccatttcttggttttgtattgttt

SEQ ID NO: 276307 - DNA, 25 bp, probe
tccttgccttggttgatttggtttt

SEQ ID NO: 276308 - DNA, 25 bp, probe
tccatgctcctttagtgcactgtgg

SEQ ID NO: 276309 - DNA, 25 bp, probe
tccatgctcctttagtgcactgtgg

SEQ ID NO: 276310 - DNA, 25 bp, probe
tccatgtcccgtatcagctgcgggg

SEQ ID NO: 276311 - DNA, 25 bp, probe
tccttccctataaagcctgcatgga

SEQ ID NO: 276312 - DNA, 25 bp, probe
tccttccctataaagcctgcatgga

SEQ ID NO: 276313 - DNA, 25 bp, probe
tccttctcctctattcctggagaat

SEQ ID NO: 276314 - DNA, 25 bp, probe
tcctaatcgatcgcttctctttgaa

SEQ ID NO: 276315 - DNA, 25 bp, probe
tcctaatcgatcgcttctctttgaa

SEQ ID NO: 276316 - DNA, 25 bp, probe
tcctactgctatccttagccttgga

SEQ ID NO: 276317 - DNA, 25 bp, probe
tcctagctcttgacttagcttagag

SEQ ID NO: 276318 - DNA, 25 bp, probe
tcctagctactcagtagtcttaggt

SEQ ID NO: 276319 - DNA, 25 bp, probe
tcctatgctccctgaagtcttacag

SEQ ID NO: 276320 - DNA, 25 bp, probe
tccattgctcccggggactcaagag

SEQ ID NO: 276321 - DNA, 25 bp, probe
tccattgctcccggggactcaagag

SEQ ID NO: 276322 - DNA, 25 bp, probe
tcctagttaccccgacacaaggagc

SEQ ID NO: 276323 - DNA, 25 bp, probe
tccatacttaccaccgatctacaag

SEQ ID NO: 276324 - DNA, 25 bp, probe
tccttctatcccactaaccaaaata

SEQ ID NO: 276325 - DNA, 25 bp, probe
tccttctatcccactaaccaaaata

SEQ ID NO: 276326 - DNA, 25 bp, probe
tccattctacaccatggtaaaagaa

SEQ ID NO: 276327 - DNA, 25 bp, probe
tccttcatacccagcgcaaaggcac

SEQ ID NO: 276328 - DNA, 25 bp, probe
tcgttaaagcaaagcgctaagtaaa

SEQ ID NO: 276329 - DNA, 25 bp, probe
tccttagaagcatcggtcggagtaa

SEQ ID NO: 276330 - DNA, 25 bp, probe
tccttagcaccaactgtgtcttaga

SEQ ID NO: 276331 - DNA, 25 bp, probe
tccttagcaccaactgtgtcttaga

SEQ ID NO: 276332 - DNA, 25 bp, probe
tccataagatgcccctgggctatga

SEQ ID NO: 276333 - DNA, 25 bp, probe
tccataaatggggtcgagaatcaag

SEQ ID NO: 276334 - DNA, 25 bp, probe
tccatagagatctgacaccaaacaa

SEQ ID NO: 276335 - DNA, 25 bp, probe
tccatgaactcaaacaccaggcaga

SEQ ID NO: 276336 - DNA, 25 bp, probe
tccatgaactcaaacaccaggcaga

SEQ ID NO: 276337 - DNA, 25 bp, probe
tccatggcaccaaacgctggtcaca

SEQ ID NO: 276338 - DNA, 25 bp, probe
tccatggcaccgtcaaggctgagaa

SEQ ID NO: 276339 - DNA, 25 bp, probe
tccatgtgacacacgactgctcata

SEQ ID NO: 276340 - DNA, 25 bp, probe
tcctgagcacatatcagctgtgctc

SEQ ID NO: 276341 - DNA, 25 bp, probe
tccggctcatttttgtcatcatggc

SEQ ID NO: 276342 - DNA, 25 bp, probe
tccatagccagcaatgttgtcaagg

SEQ ID NO: 276343 - DNA, 25 bp, probe
tccatctgggcctttgtatgagctg

SEQ ID NO: 276344 - DNA, 25 bp, probe
tccatctgtggcgacgggtgatgct

SEQ ID NO: 276345 - DNA, 25 bp, probe
tccattgctggcaactgacttgtca

SEQ ID NO: 276346 - DNA, 25 bp, probe
tccattgtccaactggctctgatac

SEQ ID NO: 276347 - DNA, 25 bp, probe
tccattgtccaactggctctgatac

SEQ ID NO: 276348 - DNA, 25 bp, probe
tccatcagcttaggggctgctgacc

SEQ ID NO: 276349 - DNA, 25 bp, probe
tccatgcagtagaggcgctgggcag

SEQ ID NO: 276350 - DNA, 25 bp, probe
tccatgcagtagaggcgctgggcag

SEQ ID NO: 276351 - DNA, 25 bp, probe
tccatgcggagttgatgctttggga

SEQ ID NO: 276352 - DNA, 25 bp, probe
tcctgacggttgatgtggcctgaaa

SEQ ID NO: 276353 - DNA, 25 bp, probe
tcctgcacgcaatggtggcctatga

SEQ ID NO: 276354 - DNA, 25 bp, probe
tcgtgccgcactagagtacctgggc

SEQ ID NO: 276355 - DNA, 25 bp, probe
tccgcagccacgaagtcaaggccga

SEQ ID NO: 276356 - DNA, 25 bp, probe
tccgcagccacgaagtcaaggccga

SEQ ID NO: 276357 - DNA, 25 bp, probe
tccgagtcaacaagatatatggcct

SEQ ID NO: 276358 - DNA, 25 bp, probe
tcctgagtctccagatgttgttctg

SEQ ID NO: 276359 - DNA, 25 bp, probe
tcctatggtcacagacttctggcct

SEQ ID NO: 276360 - DNA, 25 bp, probe
tccttgctggacagactgtcctgcc

SEQ ID NO: 276361 - DNA, 25 bp, probe
tccttgtaggaatcatgccgctctc

SEQ ID NO: 276362 - DNA, 25 bp, probe
tccttgtaggaatcatgccgctctc

SEQ ID NO: 276363 - DNA, 25 bp, probe
tccttgatagggtgctgccatggcc

SEQ ID NO: 276364 - DNA, 25 bp, probe
tccatattcagttgctaccctggtc

SEQ ID NO: 276365 - DNA, 25 bp, probe
tccatattcagttgctaccctggtc

SEQ ID NO: 276366 - DNA, 25 bp, probe
tccttgctcacttgctactagcagg

SEQ ID NO: 276367 - DNA, 25 bp, probe
tccttgctcacttgctactagcagg

SEQ ID NO: 276368 - DNA, 25 bp, probe
tccatatgcatctgtgtgtgtagag

SEQ ID NO: 276369 - DNA, 25 bp, probe
tccatcatgcacttgctatgtgcaa

SEQ ID NO: 276370 - DNA, 25 bp, probe
tccgcatcatcatcatgctgaccgt

SEQ ID NO: 276371 - DNA, 25 bp, probe
tccgcatcatcatcatgctgaccgt

SEQ ID NO: 276372 - DNA, 25 bp, probe
tcctcatgctcatcatctcagcagg

SEQ ID NO: 276373 - DNA, 25 bp, probe
tccttcatctgattccagagcactg

SEQ ID NO: 276374 - DNA, 25 bp, probe
tcgcatacatcatgaccgtcactga

SEQ ID NO: 276375 - DNA, 25 bp, probe
tcgcatacatcatgaccgtcactga

SEQ ID NO: 276376 - DNA, 25 bp, probe
tcctatcatctggagccctagtatc

SEQ ID NO: 276377 - DNA, 25 bp, probe
tcctatcactgtgacccacaaacca

SEQ ID NO: 276378 - DNA, 25 bp, probe
tccattcacagagacctagcagcac

SEQ ID NO: 276379 - DNA, 25 bp, probe
tccttcaagcatcaccaaacacagt

SEQ ID NO: 276380 - DNA, 25 bp, probe
tcctgagcaaagtaaacgaagcact

SEQ ID NO: 276381 - DNA, 25 bp, probe
tcctaacaagaacaaacatcatcaa

SEQ ID NO: 276382 - DNA, 25 bp, probe
tcctaacaagaacaaacatcatcaa

SEQ ID NO: 276383 - DNA, 25 bp, probe
tccttatcactgacacaaaaagtag

SEQ ID NO: 276384 - DNA, 25 bp, probe
tccttatcctggacatgaatgtatt

SEQ ID NO: 276385 - DNA, 25 bp, probe
tccttcctcagcaacaacgtatgtg

SEQ ID NO: 276386 - DNA, 25 bp, probe
tccttcctcagcaacaacgtatgtg

SEQ ID NO: 276387 - DNA, 25 bp, probe
tccttgcccatgcaccaagtgtaga

SEQ ID NO: 276388 - DNA, 25 bp, probe
tccctgcttcatcattaagtcctgt

SEQ ID NO: 276389 - DNA, 25 bp, probe
tcctctcttctgataaattccccat

SEQ ID NO: 276390 - DNA, 25 bp, probe
tccatttgtctgatttttgccaccc

SEQ ID NO: 276391 - DNA, 25 bp, probe
tccatttctgtgaactcttctgcaa

SEQ ID NO: 276392 - DNA, 25 bp, probe
tccatttctgtgaactcttctgcaa

SEQ ID NO: 276393 - DNA, 25 bp, probe
tccatttctctagatctgtgctctc

SEQ ID NO: 276394 - DNA, 25 bp, probe
tccttgtcccaggatggagctgatc

SEQ ID NO: 276395 - DNA, 25 bp, probe
tcctgatgaccaatgggatgaggtc

SEQ ID NO: 276396 - DNA, 25 bp, probe
tccatcaactcatggcaggggtggt

SEQ ID NO: 276397 - DNA, 25 bp, probe
tccctactatgtcctaggaatttgg

SEQ ID NO: 276398 - DNA, 25 bp, probe
tccccactgtatctaggcaacatag

SEQ ID NO: 276399 - DNA, 25 bp, probe
tccccactgtatctaggcaacatag

SEQ ID NO: 276400 - DNA, 25 bp, probe
tcctccctgttgggacgcagaggca

SEQ ID NO: 276401 - DNA, 25 bp, probe
tcctccctgttgggacgcagaggca

SEQ ID NO: 276402 - DNA, 25 bp, probe
tccatctcagccattggggcaggga

SEQ ID NO: 276403 - DNA, 25 bp, probe
tcctccacgcagaagccgaaggtga

SEQ ID NO: 276404 - DNA, 25 bp, probe
tcctatccatggaatccggagtgtt

SEQ ID NO: 276405 - DNA, 25 bp, probe
tcctcatccggaaatgctccaggtt

SEQ ID NO: 276406 - DNA, 25 bp, probe
tcctcatccggaaatgctccaggtt

SEQ ID NO: 276407 - DNA, 25 bp, probe
tccgactcgctgacaggctacagga

SEQ ID NO: 276408 - DNA, 25 bp, probe
tccgactcgctgacaggctacagga

SEQ ID NO: 276409 - DNA, 25 bp, probe
tcctcaccctgctacacatacagga

SEQ ID NO: 276410 - DNA, 25 bp, probe
tcctaggcttgattcatggagggag

SEQ ID NO: 276411 - DNA, 25 bp, probe
tccatagaggtgttaaagcggccaa

SEQ ID NO: 276412 - DNA, 25 bp, probe
tccataaggtgatacaggcctgcca

SEQ ID NO: 276413 - DNA, 25 bp, probe
tccatcaaggctgacatcgtgcacg

SEQ ID NO: 276414 - DNA, 25 bp, probe
tcctcgagttcatcaagtgccaggg

SEQ ID NO: 276415 - DNA, 25 bp, probe
tcctctccctaggaagtgccagtgc

SEQ ID NO: 276416 - DNA, 25 bp, probe
tcctcacacctaccaaaacaggcga

SEQ ID NO: 276417 - DNA, 25 bp, probe
tcctcaggccacagtaacaccctga

SEQ ID NO: 276418 - DNA, 25 bp, probe
tcctcaggccacagtaacaccctga

SEQ ID NO: 276419 - DNA, 25 bp, probe
tccatcaggccaaagaatccttctc

SEQ ID NO: 276420 - DNA, 25 bp, probe
tcctcagtgcacagcgcaattttgt

SEQ ID NO: 276421 - DNA, 25 bp, probe
tcctctggcacaagatgcacaatta

SEQ ID NO: 276422 - DNA, 25 bp, probe
tccgctgacctacgataattatacg

SEQ ID NO: 276423 - DNA, 25 bp, probe
tccgatgcaccaaactaataaaact

SEQ ID NO: 276424 - DNA, 25 bp, probe
tcctgtggtcatgatcaagatagta

SEQ ID NO: 276425 - DNA, 25 bp, probe
tccttgctatcaggatgcataggga

SEQ ID NO: 276426 - DNA, 25 bp, probe
tcgcatgtcacagggagacagtgaa

SEQ ID NO: 276427 - DNA, 25 bp, probe
tccatcatgaagtgtgacgtggaca

SEQ ID NO: 276428 - DNA, 25 bp, probe
tacatcatgaagcattacaggatga

SEQ ID NO: 276429 - DNA, 25 bp, probe
tccttacaggatttcaggcagaaga

SEQ ID NO: 276430 - DNA, 25 bp, probe
tccttccagtgagggctggagggat

SEQ ID NO: 276431 - DNA, 25 bp, probe
tccttcgcactggcgttgagtggga

SEQ ID NO: 276432 - DNA, 25 bp, probe
tccttcggcatggtgtatgagggca

SEQ ID NO: 276433 - DNA, 25 bp, probe
tcctacggcggctctgaagcagagc

SEQ ID NO: 276434 - DNA, 25 bp, probe
tcctacggcggctctgaagcagagc

SEQ ID NO: 276435 - DNA, 25 bp, probe
tccttcagggtggcctggacagaga

SEQ ID NO: 276436 - DNA, 25 bp, probe
tcctgttaattttctccctgcagaa

SEQ ID NO: 276437 - DNA, 25 bp, probe
tcctgtaagtttttgaactcaaggg

SEQ ID NO: 276438 - DNA, 25 bp, probe
tccttccagcttttcatgtttcaac

SEQ ID NO: 276439 - DNA, 25 bp, probe
tccattcctctatgctattttcacc

SEQ ID NO: 276440 - DNA, 25 bp, probe
tcctctcacggaatacaatttcact

SEQ ID NO: 276441 - DNA, 25 bp, probe
tccttcactgtgctgagaatttcta

SEQ ID NO: 276442 - DNA, 25 bp, probe
tccttccatagccagcaatgttgtc

SEQ ID NO: 276443 - DNA, 25 bp, probe
tccatctccatccaagcaaactgaa

SEQ ID NO: 276444 - DNA, 25 bp, probe
tcctagctcctgactgaacactata

SEQ ID NO: 276445 - DNA, 25 bp, probe
tcctgctggcctttgaacactatat

SEQ ID NO: 276446 - DNA, 25 bp, probe
tcctgtgccagttgggaacattact

SEQ ID NO: 276447 - DNA, 25 bp, probe
tccttccaatgagagattataacat

SEQ ID NO: 276448 - DNA, 25 bp, probe
tccttgcataatccctttaacaagc

SEQ ID NO: 276449 - DNA, 25 bp, probe
tccttgctcgattacttcctacagg

SEQ ID NO: 276450 - DNA, 25 bp, probe
tccggaagaaacatcctccggctga

SEQ ID NO: 276451 - DNA, 25 bp, probe
tcctgtaaaaacatcatttccctga

SEQ ID NO: 276452 - DNA, 25 bp, probe
tccttataattactccagactctcc

SEQ ID NO: 276453 - DNA, 25 bp, probe
tcctaatgcaacaagtcctgaatcc

SEQ ID NO: 276454 - DNA, 25 bp, probe
tcctactgcagacagaactgagccc

SEQ ID NO: 276455 - DNA, 25 bp, probe
tcctcttggatctggactcaggctc

SEQ ID NO: 276456 - DNA, 25 bp, probe
tccatcgtggactgggcacgcaggt

SEQ ID NO: 276457 - DNA, 25 bp, probe
tccatctgctggcagagagccacgc

SEQ ID NO: 276458 - DNA, 25 bp, probe
tcctagctggaatgatctgactgca

SEQ ID NO: 276459 - DNA, 25 bp, probe
tccatagggaagcctgtgtctcctg

SEQ ID NO: 276460 - DNA, 25 bp, probe
tccgggggagggagtggctcggaag

SEQ ID NO: 276461 - DNA, 25 bp, probe
tcacacgtggggggaagacgcccga

SEQ ID NO: 276462 - DNA, 25 bp, probe
tctacggagaaatggaaccccgaca

SEQ ID NO: 276463 - DNA, 25 bp, probe
tcccagaaggaatgctgacccctcg

SEQ ID NO: 276464 - DNA, 25 bp, probe
tcctcagagggaagacgaaaagcct

SEQ ID NO: 276465 - DNA, 25 bp, probe
tcctcgtgctggaagaattcaagac

SEQ ID NO: 276466 - DNA, 25 bp, probe
tcctcgtgctggaagaattcaagac

SEQ ID NO: 276467 - DNA, 25 bp, probe
tcctcctcatgctcggattcaagca

SEQ ID NO: 276468 - DNA, 25 bp, probe
tcctcctcatgctcggattcaagca

SEQ ID NO: 276469 - DNA, 25 bp, probe
tccatctccagcagctggtccaaca

SEQ ID NO: 276470 - DNA, 25 bp, probe
tccttgtcatgatgctggagccaga

SEQ ID NO: 276471 - DNA, 25 bp, probe
tccttctcatggtcatgggctatga

SEQ ID NO: 276472 - DNA, 25 bp, probe
tcctatgcagcttgatgtggtcttg

SEQ ID NO: 276473 - DNA, 25 bp, probe
tccttcatgtcactcatgtgttctg

SEQ ID NO: 276474 - DNA, 25 bp, probe
tccttcatctcactttaatgctttc

SEQ ID NO: 276475 - DNA, 25 bp, probe
tccttctgatctcttatactgtcat

SEQ ID NO: 276476 - DNA, 25 bp, probe
tccttctgatctcttatactgtcat

SEQ ID NO: 276477 - DNA, 25 bp, probe
tccattctattgtttacacaacgat

SEQ ID NO: 276478 - DNA, 25 bp, probe
tccttctgtgcctttgaatacaaat

SEQ ID NO: 276479 - DNA, 25 bp, probe
tccttcttcagcgccaatacaaaag

SEQ ID NO: 276480 - DNA, 25 bp, probe
tccttctgtgactccagtgactcag

SEQ ID NO: 276481 - DNA, 25 bp, probe
tccttcttgaagctcattcgccagg

SEQ ID NO: 276482 - DNA, 25 bp, probe
tccttgttagagttatccctgcagg

SEQ ID NO: 276483 - DNA, 25 bp, probe
tccttcttgacatttatcacctctg

SEQ ID NO: 276484 - DNA, 25 bp, probe
tcctgatttaccagacaccatctat

SEQ ID NO: 276485 - DNA, 25 bp, probe
tcctgtcttaccaaacagtgggagg

SEQ ID NO: 276486 - DNA, 25 bp, probe
tccgttattccgaaaggggcacagg

SEQ ID NO: 276487 - DNA, 25 bp, probe
tccgtgtactcgggaatccggcaca

SEQ ID NO: 276488 - DNA, 25 bp, probe
tccggaagctggggcagatcccaga

SEQ ID NO: 276489 - DNA, 25 bp, probe
tccggacaatgacgagaggccctgg

SEQ ID NO: 276490 - DNA, 25 bp, probe
tcctagagctagccggatggactct

SEQ ID NO: 276491 - DNA, 25 bp, probe
tcctaagtagctcttcagagtctga

SEQ ID NO: 276492 - DNA, 25 bp, probe
tccattagatacatttcgagacatg

SEQ ID NO: 276493 - DNA, 25 bp, probe
tcctaaaacgttaccagcagctgaa

SEQ ID NO: 276494 - DNA, 25 bp, probe
tcctcaaaccagttgtacagcctga

SEQ ID NO: 276495 - DNA, 25 bp, probe
tcctcagaaccctgaatgcaacttc

SEQ ID NO: 276496 - DNA, 25 bp, probe
tcctcagaccaggtggaattactta

SEQ ID NO: 276497 - DNA, 25 bp, probe
tcctcaccacagatggaattaactt

SEQ ID NO: 276498 - DNA, 25 bp, probe
tcctacacaggttagagcaactact

SEQ ID NO: 276499 - DNA, 25 bp, probe
tcctacacaggttagagcaactact

SEQ ID NO: 276500 - DNA, 25 bp, probe
tcctcacagggtggagatcagattg

SEQ ID NO: 276501 - DNA, 25 bp, probe
tcctcccgtgatgagaagtcatggt

SEQ ID NO: 276502 - DNA, 25 bp, probe
tcctcacgtgtactataaggctagt

SEQ ID NO: 276503 - DNA, 25 bp, probe
tcctatctgtgttttgaatggtgtt

SEQ ID NO: 276504 - DNA, 25 bp, probe
tccttgctgtgtcttgggaacctgt

SEQ ID NO: 276505 - DNA, 25 bp, probe
tccttcgtgatctggggatgtgcca

SEQ ID NO: 276506 - DNA, 25 bp, probe
tcctgaagtggctgtagcttatccc

SEQ ID NO: 276507 - DNA, 25 bp, probe
tactgaagtatccagttcttagtcc

SEQ ID NO: 276508 - DNA, 25 bp, probe
tcctattttctgcttcattggtcac

SEQ ID NO: 276509 - DNA, 25 bp, probe
tccttatatttgctcaattttccgg

SEQ ID NO: 276510 - DNA, 25 bp, probe
tcctcttatttattatttttccatt

SEQ ID NO: 276511 - DNA, 25 bp, probe
tccttctgcttttatttcttctaca

SEQ ID NO: 276512 - DNA, 25 bp, probe
tcctctcttttgcatattctaataa

SEQ ID NO: 276513 - DNA, 25 bp, probe
tccttcttccagcattataaatcag

SEQ ID NO: 276514 - DNA, 25 bp, probe
tcctggttcccgatgaacgtgcacc

SEQ ID NO: 276515 - DNA, 25 bp, probe
tcctggttcccgatgaacgtgcacc

SEQ ID NO: 276516 - DNA, 25 bp, probe
tcctgggtaaggagtactcgacctg

SEQ ID NO: 276517 - DNA, 25 bp, probe
tccgtccgaaggagcttacgacatc

SEQ ID NO: 276518 - DNA, 25 bp, probe
tccggccgaaagtgaaatcaccatt

SEQ ID NO: 276519 - DNA, 25 bp, probe
tcctggccgggagggacaagtcgca

SEQ ID NO: 276520 - DNA, 25 bp, probe
tcctcccagggaggtacaccagacc

SEQ ID NO: 276521 - DNA, 25 bp, probe
tcctcacactaaaatttcccatgac

SEQ ID NO: 276522 - DNA, 25 bp, probe
tcctcacactaaaatttcccatgac

SEQ ID NO: 276523 - DNA, 25 bp, probe
tcctcagaaatttatctttcctaga

SEQ ID NO: 276524 - DNA, 25 bp, probe
tcctacaacttttcttttctcagtc

SEQ ID NO: 276525 - DNA, 25 bp, probe
tcctacaacttttcttttctcagtc

SEQ ID NO: 276526 - DNA, 25 bp, probe
tcctacatcctgattcttaagtcag

SEQ ID NO: 276527 - DNA, 25 bp, probe
tcctcatctcctatggcttcatagc

SEQ ID NO: 276528 - DNA, 25 bp, probe
tcctgccgattgttgacttgctaga

SEQ ID NO: 276529 - DNA, 25 bp, probe
tcctgccgattgttgacttgctaga

SEQ ID NO: 276530 - DNA, 25 bp, probe
tcctgccaagtagggtttagccggg

SEQ ID NO: 276531 - DNA, 25 bp, probe
tccccaaggagggggctagcttggt

SEQ ID NO: 276532 - DNA, 25 bp, probe
tcctgaaagtgaccggggtgcctgg

SEQ ID NO: 276533 - DNA, 25 bp, probe
tcctcatcaagttcaacgcggtgcc

SEQ ID NO: 276534 - DNA, 25 bp, probe
tccattcaggactacacgaggcgct

SEQ ID NO: 276535 - DNA, 25 bp, probe
tcctacacgcgcatcaagaggccgc

SEQ ID NO: 276536 - DNA, 25 bp, probe
tcctggcccaagacaggggccgcag

SEQ ID NO: 276537 - DNA, 25 bp, probe
tcctgtctcccagaagggtcagctg

SEQ ID NO: 276538 - DNA, 25 bp, probe
tcccttcccaaagaggataggacct

SEQ ID NO: 276539 - DNA, 25 bp, probe
tcccccagtcagtgcttaaatgggc

SEQ ID NO: 276540 - DNA, 25 bp, probe
tcccctaccatgtgccaaacgggag

SEQ ID NO: 276541 - DNA, 25 bp, probe
tcctctctacttggggaaatcaggt

SEQ ID NO: 276542 - DNA, 25 bp, probe
tccttgcgactgtggtaaccacctt

SEQ ID NO: 276543 - DNA, 25 bp, probe
tccttgataatgttggcggatccac

SEQ ID NO: 276544 - DNA, 25 bp, probe
tccttgactggaattgctgctaccc

SEQ ID NO: 276545 - DNA, 25 bp, probe
tccttgactggaattgctgctaccc

SEQ ID NO: 276546 - DNA, 25 bp, probe
tcctttcagaggatgctgctacaca

SEQ ID NO: 276547 - DNA, 25 bp, probe
tccttggggagattgctgtgtctat

SEQ ID NO: 276548 - DNA, 25 bp, probe
tccttgggtggctgcttgtataaac

SEQ ID NO: 276549 - DNA, 25 bp, probe
tcctggaggggcaagcctgtataga

SEQ ID NO: 276550 - DNA, 25 bp, probe
tcctggacgaagtgcaccataagca

SEQ ID NO: 276551 - DNA, 25 bp, probe
tcctgagaatcaacccaactgaagc

SEQ ID NO: 276552 - DNA, 25 bp, probe
tcctcaggtcattgccaaccttaca

SEQ ID NO: 276553 - DNA, 25 bp, probe
tcctcagaatgttgacctcttctag

SEQ ID NO: 276554 - DNA, 25 bp, probe
tcctcaagagcccaatgcattccat

SEQ ID NO: 276555 - DNA, 25 bp, probe
tcctccatgagcatggcatagtcca

SEQ ID NO: 276556 - DNA, 25 bp, probe
tcctctctgagactgctaagtaggg

SEQ ID NO: 276557 - DNA, 25 bp, probe
tccgcttggagcccaaggatgggaa

SEQ ID NO: 276558 - DNA, 25 bp, probe
tcccctctgagacaaggaaggacaa

SEQ ID NO: 276559 - DNA, 25 bp, probe
tcccctctgagacaaggaaggacaa

SEQ ID NO: 276560 - DNA, 25 bp, probe
tcctcactctcacaagaaaaccaaa

SEQ ID NO: 276561 - DNA, 25 bp, probe
tcctacatgtcgccagaaagactcc

SEQ ID NO: 276562 - DNA, 25 bp, probe
tcctacatgtccccagaaagattcc

SEQ ID NO: 276563 - DNA, 25 bp, probe
tcctatcgtgccgcactagagtacc

SEQ ID NO: 276564 - DNA, 25 bp, probe
tccttcgtgaaggactacatgatca

SEQ ID NO: 276565 - DNA, 25 bp, probe
tccttcgtgaaggactacatgatca

SEQ ID NO: 276566 - DNA, 25 bp, probe
tccttcgagcaattgactatcttca

SEQ ID NO: 276567 - DNA, 25 bp, probe
tccttcgatttccctatgattcatg

SEQ ID NO: 276568 - DNA, 25 bp, probe
tccttgagtttgctcacagtgcctg

SEQ ID NO: 276569 - DNA, 25 bp, probe
tccttggtatggtgacagtgtctct

SEQ ID NO: 276570 - DNA, 25 bp, probe
tccttagtgagggtgccctggtcat

SEQ ID NO: 276571 - DNA, 25 bp, probe
tcctttgatggtgtgccagaagtta

SEQ ID NO: 276572 - DNA, 25 bp, probe
tcctcttctggtgcccgagggaaac

SEQ ID NO: 276573 - DNA, 25 bp, probe
tcctcttctacttcacccagaagaa

SEQ ID NO: 276574 - DNA, 25 bp, probe
tcctcttctacttcacccagaagaa

SEQ ID NO: 276575 - DNA, 25 bp, probe
tcctggctcaacccaaccaacagga

SEQ ID NO: 276576 - DNA, 25 bp, probe
tcctgtcgctccttcagacaaagga

SEQ ID NO: 276577 - DNA, 25 bp, probe
tcacgtccccttgtcaaaaaggttg

SEQ ID NO: 276578 - DNA, 25 bp, probe
tccttccccattgctgtaaatattt

SEQ ID NO: 276579 - DNA, 25 bp, probe
tccttggccctagcttggaggactt

SEQ ID NO: 276580 - DNA, 25 bp, probe
tcctgtaccccaatctaggaggctc

SEQ ID NO: 276581 - DNA, 25 bp, probe
tcctgtaccccaatctaggaggctc

SEQ ID NO: 276582 - DNA, 25 bp, probe
tcctgtaacctcatcgggattgtct

SEQ ID NO: 276583 - DNA, 25 bp, probe
tcctggaaccagatcctggaccctt

SEQ ID NO: 276584 - DNA, 25 bp, probe
tcctgacaagcggatctctgtagac

SEQ ID NO: 276585 - DNA, 25 bp, probe
tcctgcaaccagtatctccttggaa

SEQ ID NO: 276586 - DNA, 25 bp, probe
tcctataccatgtccacttagaatg

SEQ ID NO: 276587 - DNA, 25 bp, probe
tcctataccatgtccacttagaatg

SEQ ID NO: 276588 - DNA, 25 bp, probe
tccttaccatcatctccatatgaga

SEQ ID NO: 276589 - DNA, 25 bp, probe
tccttcattcttctccaagagtgct

SEQ ID NO: 276590 - DNA, 25 bp, probe
tccttcattcttctccaagagtgct

SEQ ID NO: 276591 - DNA, 25 bp, probe
tcctccatatttgtctgccaataga

SEQ ID NO: 276592 - DNA, 25 bp, probe
tcctccatatttgtctgccaataga

SEQ ID NO: 276593 - DNA, 25 bp, probe
tcctcttttgatgtctgcagaagaa

SEQ ID NO: 276594 - DNA, 25 bp, probe
tccttgtgtgtagctgctcggacac

SEQ ID NO: 276595 - DNA, 25 bp, probe
tccttgtgtgtagctgctcggacac

SEQ ID NO: 276596 - DNA, 25 bp, probe
tcctttgcattatctgatcaaattc

SEQ ID NO: 276597 - DNA, 25 bp, probe
tccttcctgattcatgcctgatatt

SEQ ID NO: 276598 - DNA, 25 bp, probe
tcctccttgttctactcatatatat

SEQ ID NO: 276599 - DNA, 25 bp, probe
tccttgcacttaaactcattccata

SEQ ID NO: 276600 - DNA, 25 bp, probe
tccttgtctctgaatgactctgtct

SEQ ID NO: 276601 - DNA, 25 bp, probe
tccttttgctgatgatctttatggc

SEQ ID NO: 276602 - DNA, 25 bp, probe
tccttttgctgatgatctttatggc

SEQ ID NO: 276603 - DNA, 25 bp, probe
tccttctgttgatgacttcgtaagt

SEQ ID NO: 276604 - DNA, 25 bp, probe
tcctatctggaatgactagagggag

SEQ ID NO: 276605 - DNA, 25 bp, probe
tcctgaatggcacaggccaagggga

SEQ ID NO: 276606 - DNA, 25 bp, probe
tctccaagtcagcacccaaaggtca

SEQ ID NO: 276607 - DNA, 25 bp, probe
tcctcaagatcccatcagctaaagg

SEQ ID NO: 276608 - DNA, 25 bp, probe
tcctcaagatcccatcagctaaagg

SEQ ID NO: 276609 - DNA, 25 bp, probe
tcctacagatattgtcccaatggga

SEQ ID NO: 276610 - DNA, 25 bp, probe
tccttcgcaagagccgtgtgctgga

SEQ ID NO: 276611 - DNA, 25 bp, probe
tccttcagcaacacctgaggcagca

SEQ ID NO: 276612 - DNA, 25 bp, probe
tcctatctccacatctctgaagaag

SEQ ID NO: 276613 - DNA, 25 bp, probe
tcctcaccatccttttgttgaaatg

SEQ ID NO: 276614 - DNA, 25 bp, probe
tcctcaccatccttttgttgaaatg

SEQ ID NO: 276615 - DNA, 25 bp, probe
tcctacgcaccattttgtcaggtgg

SEQ ID NO: 276616 - DNA, 25 bp, probe
tcctacctcaagatcttggcaatgg

SEQ ID NO: 276617 - DNA, 25 bp, probe
tcctgaagatcagtgactttgggat

SEQ ID NO: 276618 - DNA, 25 bp, probe
tcctattgagcaaccagctctgggc

SEQ ID NO: 276619 - DNA, 25 bp, probe
tcctcaatgtcttcgagttggagcg

SEQ ID NO: 276620 - DNA, 25 bp, probe
tccttattatcccagcttgctgagg

SEQ ID NO: 276621 - DNA, 25 bp, probe
tccttgctgtatccctgttgtgagg

SEQ ID NO: 276622 - DNA, 25 bp, probe
tccttgctttctgatatgcttgatg

SEQ ID NO: 276623 - DNA, 25 bp, probe
tccttttgtgctactcagatctgat

SEQ ID NO: 276624 - DNA, 25 bp, probe
tcctctgtttgcactggacatattc

SEQ ID NO: 276625 - DNA, 25 bp, probe
tcctagtcttattcggtgatgactc

SEQ ID NO: 276626 - DNA, 25 bp, probe
tcctgattttcatcgagattgccta

SEQ ID NO: 276627 - DNA, 25 bp, probe
tcctgaaatctatcagatcatgctg

SEQ ID NO: 276628 - DNA, 25 bp, probe
tccttaatatcatcagccagttcct

SEQ ID NO: 276629 - DNA, 25 bp, probe
tccttccatgactacagccatttaa

SEQ ID NO: 276630 - DNA, 25 bp, probe
tccttcctgacgtagagcagttttg

SEQ ID NO: 276631 - DNA, 25 bp, probe
tccttcctgggcatggagtcctgtg

SEQ ID NO: 276632 - DNA, 25 bp, probe
tccttctgggtggggagttctgggg

SEQ ID NO: 276633 - DNA, 25 bp, probe
tcatcggggaggggaacttcggcca

SEQ ID NO: 276634 - DNA, 25 bp, probe
tcctggggaagcataaccttcggca

SEQ ID NO: 276635 - DNA, 25 bp, probe
tcccgggagattaaccacttcttct

SEQ ID NO: 276636 - DNA, 25 bp, probe
tcccgggagattaaccacttcttct

SEQ ID NO: 276637 - DNA, 25 bp, probe
tcctagggtttctaccaatctctgt

SEQ ID NO: 276638 - DNA, 25 bp, probe
tcctgggaggatcaagctagacttc

SEQ ID NO: 276639 - DNA, 25 bp, probe
tcctgggaggatcaagctagacttc

SEQ ID NO: 276640 - DNA, 25 bp, probe
tcctggggaatatagagagttgaca

SEQ ID NO: 276641 - DNA, 25 bp, probe
tcctcgtcagtattaggaatttcca

SEQ ID NO: 276642 - DNA, 25 bp, probe
tcctgcagaaaccggaaatcttcca

SEQ ID NO: 276643 - DNA, 25 bp, probe
tcctcataaaacctgcagcagcatt

SEQ ID NO: 276644 - DNA, 25 bp, probe
tcctccagaaagtcgagcagcaccc

SEQ ID NO: 276645 - DNA, 25 bp, probe
tcctccgtgtggttgacccagatat

SEQ ID NO: 276646 - DNA, 25 bp, probe
tcctccgtgtggttgacccagatat

SEQ ID NO: 276647 - DNA, 25 bp, probe
tcctcggagtacttaacacagattg

SEQ ID NO: 276648 - DNA, 25 bp, probe
tcctcgccggtatacacaagactga

SEQ ID NO: 276649 - DNA, 25 bp, probe
tcctgggagccttgaaaaaactgga

SEQ ID NO: 276650 - DNA, 25 bp, probe
tactgagggggctgaagaaaatggc

SEQ ID NO: 276651 - DNA, 25 bp, probe
tccgaggcgggggacagaaggggca

SEQ ID NO: 276652 - DNA, 25 bp, probe
tcctgatgggggaacaccactgggg

SEQ ID NO: 276653 - DNA, 25 bp, probe
tccgaggacggttaccgcacggtgg

SEQ ID NO: 276654 - DNA, 25 bp, probe
tccggaaccggaactctgaggggtg

SEQ ID NO: 276655 - DNA, 25 bp, probe
tcctgaggactaggaagctcatcag

SEQ ID NO: 276656 - DNA, 25 bp, probe
tccgagaccaacaagagcaagtgaa

SEQ ID NO: 276657 - DNA, 25 bp, probe
tcctagaggaccaagaccaggcaga

SEQ ID NO: 276658 - DNA, 25 bp, probe
tcctcgagaagccaacagagcagta

SEQ ID NO: 276659 - DNA, 25 bp, probe
tcctgtgagtagccaaggcatcgct

SEQ ID NO: 276660 - DNA, 25 bp, probe
tcctgtgcatcaaggacatggccgg

SEQ ID NO: 276661 - DNA, 25 bp, probe
tcctgtgctcagccctgaggacaga

SEQ ID NO: 276662 - DNA, 25 bp, probe
tccttcatctcccgggagctgaagg

SEQ ID NO: 276663 - DNA, 25 bp, probe
tcctttgccacgctgcgggagaagc

SEQ ID NO: 276664 - DNA, 25 bp, probe
tcctcatcggcgtcccgaaggaagc

SEQ ID NO: 276665 - DNA, 25 bp, probe
tcctgtggagtgaccccaaggagcc

SEQ ID NO: 276666 - DNA, 25 bp, probe
tcctgtggagtgaccccaaggagcc

SEQ ID NO: 276667 - DNA, 25 bp, probe
tcctctggtctgacccagaagacac

SEQ ID NO: 276668 - DNA, 25 bp, probe
tcctttgctctggctcagcaaaatc

SEQ ID NO: 276669 - DNA, 25 bp, probe
tcctttgcaagagcgcagaccaccg

SEQ ID NO: 276670 - DNA, 25 bp, probe
tcctgtggacaagccagtgctaccc

SEQ ID NO: 276671 - DNA, 25 bp, probe
tcctgggatcgggctgaggccaggc

SEQ ID NO: 276672 - DNA, 25 bp, probe
tcctgggatcgggctgaggccaggc

SEQ ID NO: 276673 - DNA, 25 bp, probe
tcctatgagatgcgcctggttattg

SEQ ID NO: 276674 - DNA, 25 bp, probe
tcctcaatgaggcctcggtcatgaa

SEQ ID NO: 276675 - DNA, 25 bp, probe
tcctatagcattcccagtgtcacta

SEQ ID NO: 276676 - DNA, 25 bp, probe
tctcttgacagtcagcgtgccatct

SEQ ID NO: 276677 - DNA, 25 bp, probe
tcctctgatggtgcagctgagcctc

SEQ ID NO: 276678 - DNA, 25 bp, probe
tccgttggtagcttgagtcccatgc

SEQ ID NO: 276679 - DNA, 25 bp, probe
tccggggtggcagtgaggaccacct

SEQ ID NO: 276680 - DNA, 25 bp, probe
tcgcattggagttcactctggtccc

SEQ ID NO: 276681 - DNA, 25 bp, probe
tcgcttggatgcctgtaaggatccc

SEQ ID NO: 276682 - DNA, 25 bp, probe
tccttctctgtagaagtgatcctca

SEQ ID NO: 276683 - DNA, 25 bp, probe
tccttagcattgtctaagtcttcca

SEQ ID NO: 276684 - DNA, 25 bp, probe
tccttagcattgtctaagtcttcca

SEQ ID NO: 276685 - DNA, 25 bp, probe
tccttcacatcttcttaggcagtct

SEQ ID NO: 276686 - DNA, 25 bp, probe
tccttcagcatcatctggcaggaag

SEQ ID NO: 276687 - DNA, 25 bp, probe
tcctttctcacagtgacaggaaggt

SEQ ID NO: 276688 - DNA, 25 bp, probe
tcctttctcacagtgacaggaaggt

SEQ ID NO: 276689 - DNA, 25 bp, probe
tcctcttcaacagggagctgaggga

SEQ ID NO: 276690 - DNA, 25 bp, probe
tcctcttcaacagggagctgaggga

SEQ ID NO: 276691 - DNA, 25 bp, probe
tcctttagccttagcagtgggtatg

SEQ ID NO: 276692 - DNA, 25 bp, probe
tcctagccctgtgggcaggggttgg

SEQ ID NO: 276693 - DNA, 25 bp, probe
tcctagtccaggaatcatgggggta

SEQ ID NO: 276694 - DNA, 25 bp, probe
tcctagatccagggatagccccgtc

SEQ ID NO: 276695 - DNA, 25 bp, probe
tcctagatccagggatagccccgtc

SEQ ID NO: 276696 - DNA, 25 bp, probe
tcctgatggccagctgatgagcccc

SEQ ID NO: 276697 - DNA, 25 bp, probe
tcctgagaacattgctgattcttcg

SEQ ID NO: 276698 - DNA, 25 bp, probe
tcctgacacgcatctttgcttacag

SEQ ID NO: 276699 - DNA, 25 bp, probe
tccttcttgatagtttgcaggcaaa

SEQ ID NO: 276700 - DNA, 25 bp, probe
tccttacagtaccattcaggaatgg

SEQ ID NO: 276701 - DNA, 25 bp, probe
tcctcccagtgacaatatggaattc

SEQ ID NO: 276702 - DNA, 25 bp, probe
tcctaccagtggtttcggaaggcac

SEQ ID NO: 276703 - DNA, 25 bp, probe
tttgttcagggctgttggaagtagc

SEQ ID NO: 276704 - DNA, 25 bp, probe
tcctggtcccagtgttagggtagca

SEQ ID NO: 276705 - DNA, 25 bp, probe
tccgaggccttgtgtcatggggtaa

SEQ ID NO: 276706 - DNA, 25 bp, probe
tcctacctctacctgtgaggaggta

SEQ ID NO: 276707 - DNA, 25 bp, probe
tcctacagcttgaccgtgaggccag

SEQ ID NO: 276708 - DNA, 25 bp, probe
tcctagggctgtggagtgaggccag

SEQ ID NO: 276709 - DNA, 25 bp, probe
tcctccgagagagagatgagtatca

SEQ ID NO: 276710 - DNA, 25 bp, probe
tcctgcctaagaggcactactacaa

SEQ ID NO: 276711 - DNA, 25 bp, probe
tcctggctgtgatggcctttgacag

SEQ ID NO: 276712 - DNA, 25 bp, probe
tcctcagctgcatggagcctggaac

SEQ ID NO: 276713 - DNA, 25 bp, probe
tcctcagctgcatggagcctggaac

SEQ ID NO: 276714 - DNA, 25 bp, probe
tcctgagctgaccaagccagagatt

SEQ ID NO: 276715 - DNA, 25 bp, probe
tcctgagctgaccaagccagagatt

SEQ ID NO: 276716 - DNA, 25 bp, probe
tcctgactgtcctacaatatcattt

SEQ ID NO: 276717 - DNA, 25 bp, probe
tcctactccctgaagagcgcaatat

SEQ ID NO: 276718 - DNA, 25 bp, probe
tcctactccctgaagagcgcaatat

SEQ ID NO: 276719 - DNA, 25 bp, probe
tcctacatccacattgtgccagcta

SEQ ID NO: 276720 - DNA, 25 bp, probe
tcctacatccacattgtgccagcta

SEQ ID NO: 276721 - DNA, 25 bp, probe
tcctaagccctttcatgctagcagg

SEQ ID NO: 276722 - DNA, 25 bp, probe
tcctaagccctttcatgctagcagg

SEQ ID NO: 276723 - DNA, 25 bp, probe
tcctaggccctgttcatgtgggaga

SEQ ID NO: 276724 - DNA, 25 bp, probe
tcctaggccctgttcatgtgggaga

SEQ ID NO: 276725 - DNA, 25 bp, probe
tcctagatcgccctgactgggagga

SEQ ID NO: 276726 - DNA, 25 bp, probe
tcctagatcgccctgactgggagga

SEQ ID NO: 276727 - DNA, 25 bp, probe
tcctttcagacttgactggagaggg

SEQ ID NO: 276728 - DNA, 25 bp, probe
tcctttacaccaactgtcaatgccg

SEQ ID NO: 276729 - DNA, 25 bp, probe
tccttttatctcactctagtccagg

SEQ ID NO: 276730 - DNA, 25 bp, probe
tcctatttttcacctaagtcatctt

SEQ ID NO: 276731 - DNA, 25 bp, probe
tcctttgtctttctttgtcattcag

SEQ ID NO: 276732 - DNA, 25 bp, probe
tcctttttctctctcatattaatct

SEQ ID NO: 276733 - DNA, 25 bp, probe
tcctttttcccttctgtgatgaatt

SEQ ID NO: 276734 - DNA, 25 bp, probe
tcctatctatatggcccctgaagtt

SEQ ID NO: 276735 - DNA, 25 bp, probe
tcctaattacattgctcctgaaatt

SEQ ID NO: 276736 - DNA, 25 bp, probe
tcctaactccatgtctctgagcatt

SEQ ID NO: 276737 - DNA, 25 bp, probe
tcctacctacatctgcttgagcagt

SEQ ID NO: 276738 - DNA, 25 bp, probe
tcctactgcctcattgctcaggcag

SEQ ID NO: 276739 - DNA, 25 bp, probe
tcctttgccatcactctctggcaaa

SEQ ID NO: 276740 - DNA, 25 bp, probe
tcctctaccaccagctattcaaaga

SEQ ID NO: 276741 - DNA, 25 bp, probe
tcctctaccaccagctattcaaaga

SEQ ID NO: 276742 - DNA, 25 bp, probe
tcctggctccccaagtacttaaatg

SEQ ID NO: 276743 - DNA, 25 bp, probe
tcctactccctcagattatgtaatt

SEQ ID NO: 276744 - DNA, 25 bp, probe
tcctttccctaccactgtgatagtg

SEQ ID NO: 276745 - DNA, 25 bp, probe
tcctttccaatacgattttctgttg

SEQ ID NO: 276746 - DNA, 25 bp, probe
tccttatctcttatgctttcatttt

SEQ ID NO: 276747 - DNA, 25 bp, probe
tccttattgttgactgctttgttct

SEQ ID NO: 276748 - DNA, 25 bp, probe
tcctctttggggccaagctgtactc

SEQ ID NO: 276749 - DNA, 25 bp, probe
tcctctttggggccaagctgtactc

SEQ ID NO: 276750 - DNA, 25 bp, probe
tccctttagcagccaaagattcgct

SEQ ID NO: 276751 - DNA, 25 bp, probe
tcctttgtatctctaagttacatga

SEQ ID NO: 276752 - DNA, 25 bp, probe
tcctttgtactctataatgtgaact

SEQ ID NO: 276753 - DNA, 25 bp, probe
tcctttgtcccatgcacaatgcaga

SEQ ID NO: 276754 - DNA, 25 bp, probe
tcctttcatcctcagcaagtgctga

SEQ ID NO: 276755 - DNA, 25 bp, probe
tcctcttatcttctgccaggatcac

SEQ ID NO: 276756 - DNA, 25 bp, probe
tcctcttatcttctgccaggatcac

SEQ ID NO: 276757 - DNA, 25 bp, probe
tcctaatatcatttgtactgaagac

SEQ ID NO: 276758 - DNA, 25 bp, probe
tccttagcaatgccttagctgggac

SEQ ID NO: 276759 - DNA, 25 bp, probe
tcctgaagcactccttcttggagag

SEQ ID NO: 276760 - DNA, 25 bp, probe
tcctgaacttgtgactacgagaaat

SEQ ID NO: 276761 - DNA, 25 bp, probe
tcgtgaacttgtcctcttaaaatgt

SEQ ID NO: 276762 - DNA, 25 bp, probe
tcgccagttgtgcacttttacaagc

SEQ ID NO: 276763 - DNA, 25 bp, probe
tcctagtggcgcgagcttttgactc

SEQ ID NO: 276764 - DNA, 25 bp, probe
tcctaggtgctggatgctttgtcat

SEQ ID NO: 276765 - DNA, 25 bp, probe
tcctcagagggcggctttacttttt

SEQ ID NO: 276766 - DNA, 25 bp, probe
tcctgtgagggcttggtttccttat

SEQ ID NO: 276767 - DNA, 25 bp, probe
tccgtgatggaaaccacttcctcta

SEQ ID NO: 276768 - DNA, 25 bp, probe
tccggttgagagaacagattcgttg

SEQ ID NO: 276769 - DNA, 25 bp, probe
tcctggtatgacaacgaatttggct

SEQ ID NO: 276770 - DNA, 25 bp, probe
tcctgcggaagcagtgacctctgac

SEQ ID NO: 276771 - DNA, 25 bp, probe
tcctgtgaatggaaggacccaagcc

SEQ ID NO: 276772 - DNA, 25 bp, probe
tccggagctgcgaggccaaacagca

SEQ ID NO: 276773 - DNA, 25 bp, probe
tcctggacagaaagcgccataacag

SEQ ID NO: 276774 - DNA, 25 bp, probe
tcctggcagaggatgcactcaacac

SEQ ID NO: 276775 - DNA, 25 bp, probe
tcctggtgcacgaaaacaacacgca

SEQ ID NO: 276776 - DNA, 25 bp, probe
tcctcttcctgttaaaaccatgaga

SEQ ID NO: 276777 - DNA, 25 bp, probe
tcccttccatggccaaaactattac

SEQ ID NO: 276778 - DNA, 25 bp, probe
tcccttccatggccaaaactattac

SEQ ID NO: 276779 - DNA, 25 bp, probe
tcctcttcctggatctgagaattta

SEQ ID NO: 276780 - DNA, 25 bp, probe
tccggattcttcatcggaatttggg

SEQ ID NO: 276781 - DNA, 25 bp, probe
tcctgtttcttagtccgaatgttag

SEQ ID NO: 276782 - DNA, 25 bp, probe
tccttttctgaatccagttgtctat

SEQ ID NO: 276783 - DNA, 25 bp, probe
tccttttcatgataccttcagattt

SEQ ID NO: 276784 - DNA, 25 bp, probe
tcctttatctgtgacttcatgctct

SEQ ID NO: 276785 - DNA, 25 bp, probe
tcctacgatcggtacatggctatct

SEQ ID NO: 276786 - DNA, 25 bp, probe
tcctaccacgctgacaggtgtgctt

SEQ ID NO: 276787 - DNA, 25 bp, probe
tcctagccctcagaaactgtatccc

SEQ ID NO: 276788 - DNA, 25 bp, probe
tcctcactgcctggtaaaattaagc

SEQ ID NO: 276789 - DNA, 25 bp, probe
tcctcactgcctggtaaaattaagc

SEQ ID NO: 276790 - DNA, 25 bp, probe
tcctcctgcctcttatggaagaaga

SEQ ID NO: 276791 - DNA, 25 bp, probe
tcctcatcttctccatgtggaaaca

SEQ ID NO: 276792 - DNA, 25 bp, probe
tcctctcatgtctttgctgcagaac

SEQ ID NO: 276793 - DNA, 25 bp, probe
tcctgctgtgattcttcgaaatctc

SEQ ID NO: 276794 - DNA, 25 bp, probe
tcctgtggatggtattgtagcatgt

SEQ ID NO: 276795 - DNA, 25 bp, probe
tcctcttcatgcatgtttctgagtg

SEQ ID NO: 276796 - DNA, 25 bp, probe
tcctgcttcatagccatgctggaga

SEQ ID NO: 276797 - DNA, 25 bp, probe
tcctgatggcacccacacagaggac

SEQ ID NO: 276798 - DNA, 25 bp, probe
tcctgaatgcaccataatcgctgta

SEQ ID NO: 276799 - DNA, 25 bp, probe
tcctgaatgcaccataatcgctgta

SEQ ID NO: 276800 - DNA, 25 bp, probe
tcctgaatgcaccataatcgctgta

SEQ ID NO: 276801 - DNA, 25 bp, probe
tcctaatcatcccaatgttgtaaag

SEQ ID NO: 276802 - DNA, 25 bp, probe
tcctagatcaccgaggttatgccaa

SEQ ID NO: 276803 - DNA, 25 bp, probe
tcctaattcctgtatgttatccact

SEQ ID NO: 276804 - DNA, 25 bp, probe
tcctctattcctggagaatgtacca

SEQ ID NO: 276805 - DNA, 25 bp, probe
tccctcattccaagaaatccacctt

SEQ ID NO: 276806 - DNA, 25 bp, probe
tccctcattccaagaaatccacctt

SEQ ID NO: 276807 - DNA, 25 bp, probe
tccctcattccaagaaatccacctt

SEQ ID NO: 276808 - DNA, 25 bp, probe
tcctcgcttccaagaattgcatcca

SEQ ID NO: 276809 - DNA, 25 bp, probe
tcctccttccatggaacctgacgta

SEQ ID NO: 276810 - DNA, 25 bp, probe
tcctcctgtaatggaacctgtggtg

SEQ ID NO: 276811 - DNA, 25 bp, probe
tcctctctggtcagacatcgctgga

SEQ ID NO: 276812 - DNA, 25 bp, probe
tcctttgctgttgactggtggtccc

SEQ ID NO: 276813 - DNA, 25 bp, probe
tccggagctacgggaggtcgtctcc

SEQ ID NO: 276814 - DNA, 25 bp, probe
tcctgaagctgacccgaggtcttcc

SEQ ID NO: 276815 - DNA, 25 bp, probe
tcctacatctagccatgcgaggtct

SEQ ID NO: 276816 - DNA, 25 bp, probe
tcctacatgtattgctgctacttca

SEQ ID NO: 276817 - DNA, 25 bp, probe
tcctcaggtgatttgtatgctcatt

SEQ ID NO: 276818 - DNA, 25 bp, probe
tcctctgacttggtatatgctcatc

SEQ ID NO: 276819 - DNA, 25 bp, probe
tcccatgagctcaatgcattttcat

SEQ ID NO: 276820 - DNA, 25 bp, probe
tcctcatgtgttactctgttgcaga

SEQ ID NO: 276821 - DNA, 25 bp, probe
tcctctcttctcactttgagattga

SEQ ID NO: 276822 - DNA, 25 bp, probe
tcctctttattgcctactatttgtc

SEQ ID NO: 276823 - DNA, 25 bp, probe
tcctttgtcatttgcaaccagtttc

SEQ ID NO: 276824 - DNA, 25 bp, probe
tcctttggcatttgtcaactgcttt

SEQ ID NO: 276825 - DNA, 25 bp, probe
tcctttgtgcaaattaaatttgatg

SEQ ID NO: 276826 - DNA, 25 bp, probe
tcctttgtgaagctggaacactggc

SEQ ID NO: 276827 - DNA, 25 bp, probe
tcctactggtagatggaacagcatg

SEQ ID NO: 276828 - DNA, 25 bp, probe
tcctagccgaggaggctgacgatga

SEQ ID NO: 276829 - DNA, 25 bp, probe
tcctccctggagaagagctacgagc

SEQ ID NO: 276830 - DNA, 25 bp, probe
tcctccatttgacagagctaaggcc

SEQ ID NO: 276831 - DNA, 25 bp, probe
tcctctttgagccctagctaagtca

SEQ ID NO: 276832 - DNA, 25 bp, probe
tcctctacggcaccgagaaggtccg

SEQ ID NO: 276833 - DNA, 25 bp, probe
tcctccggccctggagggagcatct

SEQ ID NO: 276834 - DNA, 25 bp, probe
tcctctcagtctcctcaggagttgt

SEQ ID NO: 276835 - DNA, 25 bp, probe
tcctctcagtgttttggactccatc

SEQ ID NO: 276836 - DNA, 25 bp, probe
tcctgtagctactgtgcagaccaca

SEQ ID NO: 276837 - DNA, 25 bp, probe
tcctgtagctactgtgcagaccaca

SEQ ID NO: 276838 - DNA, 25 bp, probe
tcctggtctacatgctcaaacacca

SEQ ID NO: 276839 - DNA, 25 bp, probe
tccggtatgtcaccatcatgaacac

SEQ ID NO: 276840 - DNA, 25 bp, probe
tccggtattctctgatggacctgct

SEQ ID NO: 276841 - DNA, 25 bp, probe
tccggacactcctagagaacgcagc

SEQ ID NO: 276842 - DNA, 25 bp, probe
tccgccaccctcaatataatcagcg

SEQ ID NO: 276843 - DNA, 25 bp, probe
tccccactcagcatattaccagggg

SEQ ID NO: 276844 - DNA, 25 bp, probe
tcccgcagtgacctcatgttcgaga

SEQ ID NO: 276845 - DNA, 25 bp, probe
tcccgcagtgacctcatgttcgaga

SEQ ID NO: 276846 - DNA, 25 bp, probe
tccgcagttgcccttgttcggaatc

SEQ ID NO: 276847 - DNA, 25 bp, probe
tccgcagttgcccttgttcggaatc

SEQ ID NO: 276848 - DNA, 25 bp, probe
tccgcaaagacctgtacgccaacac

SEQ ID NO: 276849 - DNA, 25 bp, probe
tccgcttagacctgtcggatgaaga

SEQ ID NO: 276850 - DNA, 25 bp, probe
tcccttagcgttgcctggaaaagcc

SEQ ID NO: 276851 - DNA, 25 bp, probe
tcctcttggtttaccaggaaagctg

SEQ ID NO: 276852 - DNA, 25 bp, probe
tcgtttgccttaattctcgaacagt

SEQ ID NO: 276853 - DNA, 25 bp, probe
tccggagcctggaattgcgcaacac

SEQ ID NO: 276854 - DNA, 25 bp, probe
tccggagcctggaattgcgcaacac

SEQ ID NO: 276855 - DNA, 25 bp, probe
tccgtcactcgtacttgggacaggc

SEQ ID NO: 276856 - DNA, 25 bp, probe
tccgtcactcgtacttgggacaggc

SEQ ID NO: 276857 - DNA, 25 bp, probe
tccccaccagctctttggaagtgag

SEQ ID NO: 276858 - DNA, 25 bp, probe
tcctcgaccattcgtttgtcaaggt

SEQ ID NO: 276859 - DNA, 25 bp, probe
tcctgggccattggctttggcatct

SEQ ID NO: 276860 - DNA, 25 bp, probe
tcgctgaggccaaagtttccatgta

SEQ ID NO: 276861 - DNA, 25 bp, probe
tcctatgatctcaggttctccttga

SEQ ID NO: 276862 - DNA, 25 bp, probe
tcctatcaccatacttttccatgtg

SEQ ID NO: 276863 - DNA, 25 bp, probe
tcctcaccaatgacattcttttctt

SEQ ID NO: 276864 - DNA, 25 bp, probe
tcctcagtaacatttctgttctcat

SEQ ID NO: 276865 - DNA, 25 bp, probe
tcctgcgtatatttgggatttgcat

SEQ ID NO: 276866 - DNA, 25 bp, probe
tcctgcttatatttaggaacatatg

SEQ ID NO: 276867 - DNA, 25 bp, probe
tcctggtcttatcatggacaatttg

SEQ ID NO: 276868 - DNA, 25 bp, probe
tcctggaatgcttaatggacctttc

SEQ ID NO: 276869 - DNA, 25 bp, probe
tcctgaacatgttcctggccatcat

SEQ ID NO: 276870 - DNA, 25 bp, probe
tcctaagctacatatggccatcttg

SEQ ID NO: 276871 - DNA, 25 bp, probe
tcctacagcgacaagaacctcatcg

SEQ ID NO: 276872 - DNA, 25 bp, probe
tcctgacacgcaaagacacagccct

SEQ ID NO: 276873 - DNA, 25 bp, probe
tcctgcaacagcagaccaagcaccg

SEQ ID NO: 276874 - DNA, 25 bp, probe
tcctcctagaggaccaagaccaggc

SEQ ID NO: 276875 - DNA, 25 bp, probe
tcctcctagaggaccaagaccaggc

SEQ ID NO: 276876 - DNA, 25 bp, probe
tcctcccggtgcccaagaatagatg

SEQ ID NO: 276877 - DNA, 25 bp, probe
tcctccttttgtccacaggtatgag

SEQ ID NO: 276878 - DNA, 25 bp, probe
tcctccagtgacctgtcaaggctta

SEQ ID NO: 276879 - DNA, 25 bp, probe
tcctccagtgacctgtcaaggctta

SEQ ID NO: 276880 - DNA, 25 bp, probe
tcctcagtgtgagtcctcagagcct

SEQ ID NO: 276881 - DNA, 25 bp, probe
tcctcagggtccctcaggaccaaag

SEQ ID NO: 276882 - DNA, 25 bp, probe
tcctgagggtcccttcaaccaaagg

SEQ ID NO: 276883 - DNA, 25 bp, probe
tcctgagggaccctctcatttctga

SEQ ID NO: 276884 - DNA, 25 bp, probe
tcctcaggaatctgtctatcttgga

SEQ ID NO: 276885 - DNA, 25 bp, probe
tcctgacagaatgccactttgtgga

SEQ ID NO: 276886 - DNA, 25 bp, probe
tcctgacagaatgccactttgtgga

SEQ ID NO: 276887 - DNA, 25 bp, probe
tcctgagcgcaagtactccgtgtgg

SEQ ID NO: 276888 - DNA, 25 bp, probe
tccgcaggaagctgcttcggggggt

SEQ ID NO: 276889 - DNA, 25 bp, probe
tccgagatgttctgggcacgggggc

SEQ ID NO: 276890 - DNA, 25 bp, probe
tccggaggcccgagatccatggggc

SEQ ID NO: 276891 - DNA, 25 bp, probe
tccgggatggtgcggagccggggga

SEQ ID NO: 276892 - DNA, 25 bp, probe
tcctgggaggagagacactggtggg

SEQ ID NO: 276893 - DNA, 25 bp, probe
tcctggggggcccaatggggagaga

SEQ ID NO: 276894 - DNA, 25 bp, probe
tccggggtgcggacaaggtgggaga

SEQ ID NO: 276895 - DNA, 25 bp, probe
tccgggggcttacggagctggtgga

SEQ ID NO: 276896 - DNA, 25 bp, probe
tccggacagggcagggagcatgagc

SEQ ID NO: 276897 - DNA, 25 bp, probe
tcctggcgtgggagttcacagcagc

SEQ ID NO: 276898 - DNA, 25 bp, probe
tcctggcgtgggagttcacagcagc

SEQ ID NO: 276899 - DNA, 25 bp, probe
tcctagctgtgtgtcttccacaatg

SEQ ID NO: 276900 - DNA, 25 bp, probe
tcctctcagaaagtcttcctcaatg

SEQ ID NO: 276901 - DNA, 25 bp, probe
tctcctagaccagttcaaccaattc

SEQ ID NO: 276902 - DNA, 25 bp, probe
tcctgaacctgagttcaaccaaccg

SEQ ID NO: 276903 - DNA, 25 bp, probe
tccgggccgagtacaaggccacggg

SEQ ID NO: 276904 - DNA, 25 bp, probe
tcctggccgggtaagggtgcctagc

SEQ ID NO: 276905 - DNA, 25 bp, probe
tcctgtgcatcagtgacttagggct

SEQ ID NO: 276906 - DNA, 25 bp, probe
tcctggccattcctgaagcgattgg

SEQ ID NO: 276907 - DNA, 25 bp, probe
tcctgtcctctcttaacagcagtgc

SEQ ID NO: 276908 - DNA, 25 bp, probe
tcctgatactctaccatcaccagag

SEQ ID NO: 276909 - DNA, 25 bp, probe
tcctctactatgagcaagtctgagt

SEQ ID NO: 276910 - DNA, 25 bp, probe
tcctcatcaaaaccaagtcgcagct

SEQ ID NO: 276911 - DNA, 25 bp, probe
tccccaaaaggctgcccagccttac

SEQ ID NO: 276912 - DNA, 25 bp, probe
tccccaaaaggctgcccagccttac

SEQ ID NO: 276913 - DNA, 25 bp, probe
tcctctagaactatcccacaggctt

SEQ ID NO: 276914 - DNA, 25 bp, probe
tcccataggtcttgtgaaaaggctt

SEQ ID NO: 276915 - DNA, 25 bp, probe
tcctgataagttttaaccaaagtca

SEQ ID NO: 276916 - DNA, 25 bp, probe
tcctgctcgtgtcttaacctaagtg

SEQ ID NO: 276917 - DNA, 25 bp, probe
tcctgtttgcctgtacgcacaaagg

SEQ ID NO: 276918 - DNA, 25 bp, probe
tcctgtttatctatactcagtaatg

SEQ ID NO: 276919 - DNA, 25 bp, probe
tcctcttttttatggctttctgggg

SEQ ID NO: 276920 - DNA, 25 bp, probe
tcctcttcctttcagacttgactgg

SEQ ID NO: 276921 - DNA, 25 bp, probe
tcctgttactgttgggtcttggctg

SEQ ID NO: 276922 - DNA, 25 bp, probe
tcctgtgtacagcatcgttctttgc

SEQ ID NO: 276923 - DNA, 25 bp, probe
tccggatatatttccctgctgttgc

SEQ ID NO: 276924 - DNA, 25 bp, probe
tccggatatatttccctgctgttgc

SEQ ID NO: 276925 - DNA, 25 bp, probe
tcctggatgaaatggagctgctgga

SEQ ID NO: 276926 - DNA, 25 bp, probe
tcctgtgtgtgaatcgggatgctaa

SEQ ID NO: 276927 - DNA, 25 bp, probe
tcctgttggctcacagggctgaaag

SEQ ID NO: 276928 - DNA, 25 bp, probe
tccggtggctttagccgtgcaaatc

SEQ ID NO: 276929 - DNA, 25 bp, probe
tcctgaggtgttcacgcagtgcact

SEQ ID NO: 276930 - DNA, 25 bp, probe
tccgaaatgccacactggtcaatga

SEQ ID NO: 276931 - DNA, 25 bp, probe
tcctgaacgggcgactgtgtcttga

SEQ ID NO: 276932 - DNA, 25 bp, probe
tcctgacctgtgagcacattggctg

SEQ ID NO: 276933 - DNA, 25 bp, probe
tcctcacagcggggcagtgtggtgc

SEQ ID NO: 276934 - DNA, 25 bp, probe
tcctgaaggccacggttcaggcccc

SEQ ID NO: 276935 - DNA, 25 bp, probe
tcctgaaggccacggttcaggcccc

SEQ ID NO: 276936 - DNA, 25 bp, probe
tcctggagtccacgtttaactcctc

SEQ ID NO: 276937 - DNA, 25 bp, probe
tcctggctaacacggtgaaacccca

SEQ ID NO: 276938 - DNA, 25 bp, probe
tccggcagagcccggtgaagacccc

SEQ ID NO: 276939 - DNA, 25 bp, probe
tccggcgaggcgcatgcagtacgcc

SEQ ID NO: 276940 - DNA, 25 bp, probe
tcgcccgagtgggatgattactcgg

SEQ ID NO: 276941 - DNA, 25 bp, probe
tcccaattgggattttacatctgga

SEQ ID NO: 276942 - DNA, 25 bp, probe
tcccagtacctcacttgttcggatt

SEQ ID NO: 276943 - DNA, 25 bp, probe
tcccaggacgtcagttctgtccatg

SEQ ID NO: 276944 - DNA, 25 bp, probe
tcctaagtcagggtgttatgtcctg

SEQ ID NO: 276945 - DNA, 25 bp, probe
tcctacaggggattgtgttttgtca

SEQ ID NO: 276946 - DNA, 25 bp, probe
tccgaaggcgataatgttctggtga

SEQ ID NO: 276947 - DNA, 25 bp, probe
tcctgacctggtatggtcatggaag

SEQ ID NO: 276948 - DNA, 25 bp, probe
tcctgaccgtggagcagcgcatgaa

SEQ ID NO: 276949 - DNA, 25 bp, probe
tcctaatctggttgtcatgccatga

SEQ ID NO: 276950 - DNA, 25 bp, probe
tcctggtcgctttgccatcaagaaa

SEQ ID NO: 276951 - DNA, 25 bp, probe
tctctagtacttcggatcaagaaga

SEQ ID NO: 276952 - DNA, 25 bp, probe
tcctccatagcctggccaaggagac

SEQ ID NO: 276953 - DNA, 25 bp, probe
tcctgcaaagccttctccacaagga

SEQ ID NO: 276954 - DNA, 25 bp, probe
tcctctacagcttcatcaatcgcaa

SEQ ID NO: 276955 - DNA, 25 bp, probe
tcctcatacaagtaaacacagaaag

SEQ ID NO: 276956 - DNA, 25 bp, probe
tcctcatcccggaagcatgacagca

SEQ ID NO: 276957 - DNA, 25 bp, probe
tcctctgcctgcaagtgagcaggga

SEQ ID NO: 276958 - DNA, 25 bp, probe
tcctctgccttcggagggaaattgt

SEQ ID NO: 276959 - DNA, 25 bp, probe
tcgttgccttcacagtggacaatgg

SEQ ID NO: 276960 - DNA, 25 bp, probe
tcttcagctctaacggggacaacgg

SEQ ID NO: 276961 - DNA, 25 bp, probe
tcctactcaaagaggtgacgtccgt

SEQ ID NO: 276962 - DNA, 25 bp, probe
tcctactcaaagaggtgacgtccgt

SEQ ID NO: 276963 - DNA, 25 bp, probe
tcccactaaatgagctgtacccacc

SEQ ID NO: 276964 - DNA, 25 bp, probe
tcctctcttaataggtggcactacc

SEQ ID NO: 276965 - DNA, 25 bp, probe
tcctctcttaacagcagtgccaacc

SEQ ID NO: 276966 - DNA, 25 bp, probe
tcgttaaagatatcatggccaaagc

SEQ ID NO: 276967 - DNA, 25 bp, probe
tctgcctaatagtaactggttaaaa

SEQ ID NO: 276968 - DNA, 25 bp, probe
tcctctccaacgacctggttatgaa

SEQ ID NO: 276969 - DNA, 25 bp, probe
tcctctggaacgacttggtgctgga

SEQ ID NO: 276970 - DNA, 25 bp, probe
tcctcggtgttgtctgtggtggaga

SEQ ID NO: 276971 - DNA, 25 bp, probe
tcctcggtggggatgtgcccatcag

SEQ ID NO: 276972 - DNA, 25 bp, probe
tcctcacccgggtctgtataacaga

SEQ ID NO: 276973 - DNA, 25 bp, probe
tcctgaccctgacgttgtgatacgc

SEQ ID NO: 276974 - DNA, 25 bp, probe
tcctgacctcaggtgattcaccagc

SEQ ID NO: 276975 - DNA, 25 bp, probe
tcctgaccgcaggtggtgcttcagg

SEQ ID NO: 276976 - DNA, 25 bp, probe
tcctggatcagggtggatcatgtgc

SEQ ID NO: 276977 - DNA, 25 bp, probe
tcctggaccacgagatcgatggctc

SEQ ID NO: 276978 - DNA, 25 bp, probe
tccggaaagtgtagtcctgccctaa

SEQ ID NO: 276979 - DNA, 25 bp, probe
tccggcacatgaattgggacgacct

SEQ ID NO: 276980 - DNA, 25 bp, probe
tcctggactatattgtgaacgagcc

SEQ ID NO: 276981 - DNA, 25 bp, probe
tcctgcgggtggggagactgagccc

SEQ ID NO: 276982 - DNA, 25 bp, probe
tcctgcgggtggggagactgagccc

SEQ ID NO: 276983 - DNA, 25 bp, probe
tcctggaggtgaggcacgagctgaa

SEQ ID NO: 276984 - DNA, 25 bp, probe
tcctgcgggctaggcagccaggagc

SEQ ID NO: 276985 - DNA, 25 bp, probe
tcctgctgaccacctagtcatggac

SEQ ID NO: 276986 - DNA, 25 bp, probe
tcctcatcacagagcggtctggcac

SEQ ID NO: 276987 - DNA, 25 bp, probe
tcctcagccagttgggtgtgcgcag

SEQ ID NO: 276988 - DNA, 25 bp, probe
tcctcagccagttgggtgtgcgcag

SEQ ID NO: 276989 - DNA, 25 bp, probe
tcctgcggatgatgggatgtgagcg

SEQ ID NO: 276990 - DNA, 25 bp, probe
tcctgccatgatgcagtgggtccgc

SEQ ID NO: 276991 - DNA, 25 bp, probe
tcctgccatgatgcagtgggtccgc

SEQ ID NO: 276992 - DNA, 25 bp, probe
tcctccagactcgagagggctgagc

SEQ ID NO: 276993 - DNA, 25 bp, probe
tcctcacactcagcgatgacctgtg

SEQ ID NO: 276994 - DNA, 25 bp, probe
tcccagccttgtgcagacaatgctg

SEQ ID NO: 276995 - DNA, 25 bp, probe
tccgagtctgtgtagcagacaggtc

SEQ ID NO: 276996 - DNA, 25 bp, probe
tccgagtctgtgtagcagacaggtc

SEQ ID NO: 276997 - DNA, 25 bp, probe
tcgctggcgtctacagcaacgagct

SEQ ID NO: 276998 - DNA, 25 bp, probe
tcctggcgtactggaatgacactta

SEQ ID NO: 276999 - DNA, 25 bp, probe
tcctgcgggcagggaagtcttcttg

SEQ ID NO: 277000 - DNA, 25 bp, probe
tcctgggagctcaggaggcttctga

SEQ ID NO: 277001 - DNA, 25 bp, probe
tcctgctacaggaggggtctcatgt

SEQ ID NO: 277002 - DNA, 25 bp, probe
tcctgtgaagaatcagggtcagtgt

SEQ ID NO: 277003 - DNA, 25 bp, probe
tcctgtaccacacggtggctcagat

SEQ ID NO: 277004 - DNA, 25 bp, probe
tccctacatcaacgtctggtatgac

SEQ ID NO: 277005 - DNA, 25 bp, probe
tccctgatcctacatcatggtacag

SEQ ID NO: 277006 - DNA, 25 bp, probe
tcccatacccatcgtgtggtacgtc

SEQ ID NO: 277007 - DNA, 25 bp, probe
tcctcagacacctgtggaataccca

SEQ ID NO: 277008 - DNA, 25 bp, probe
tcctcaaagccaagctggggatgcc

SEQ ID NO: 277009 - DNA, 25 bp, probe
tccccaggccattctgggacctaag

SEQ ID NO: 277010 - DNA, 25 bp, probe
tccccagccctctggtagtttatgc

SEQ ID NO: 277011 - DNA, 25 bp, probe
tccccaatttccaataagtcctatc

SEQ ID NO: 277012 - DNA, 25 bp, probe
tatcccaagttggaagggaccccag

SEQ ID NO: 277013 - DNA, 25 bp, probe
tcatcgtcaaggaccagagggcccg

SEQ ID NO: 277014 - DNA, 25 bp, probe
tcctgatcgaggaccaaggtgccca

SEQ ID NO: 277015 - DNA, 25 bp, probe
tccgtcagggacacaactgccacaa

SEQ ID NO: 277016 - DNA, 25 bp, probe
tccgtacggcacccagagtacaaca

SEQ ID NO: 277017 - DNA, 25 bp, probe
tcctgccagggcggccaagacaaaa

SEQ ID NO: 277018 - DNA, 25 bp, probe
tcctgccaaggggcgccaggagcag

SEQ ID NO: 277019 - DNA, 25 bp, probe
tcctgccaaggggcgccaggagcag

SEQ ID NO: 277020 - DNA, 25 bp, probe
tccgaaaggggcacaggcatgccaa

SEQ ID NO: 277021 - DNA, 25 bp, probe
tcccaatagctgttgcccattgacc

SEQ ID NO: 277022 - DNA, 25 bp, probe
tcctcgtctgctgctggagcagtga

SEQ ID NO: 277023 - DNA, 25 bp, probe
tcctcattcctactgtgagcacatg

SEQ ID NO: 277024 - DNA, 25 bp, probe
tcctccccatgactgtcatcagtgt

SEQ ID NO: 277025 - DNA, 25 bp, probe
tcctccccatgactgtcatcagtgt

SEQ ID NO: 277026 - DNA, 25 bp, probe
tcctcagttcatgctcttctgtgta

SEQ ID NO: 277027 - DNA, 25 bp, probe
tcctcgtatcatccatctacttggg

SEQ ID NO: 277028 - DNA, 25 bp, probe
tcctcagtggcaaattccgggagca

SEQ ID NO: 277029 - DNA, 25 bp, probe
tcctcgtctgaatcatccgaggcaa

SEQ ID NO: 277030 - DNA, 25 bp, probe
tcctctctctgaaatcactgcgcag

SEQ ID NO: 277031 - DNA, 25 bp, probe
tcctctgtgtcaacatctctggagc

SEQ ID NO: 277032 - DNA, 25 bp, probe
tcctcatgatcttcaacagtgggct

SEQ ID NO: 277033 - DNA, 25 bp, probe
tcctgcagatgctctcagagtccgt

SEQ ID NO: 277034 - DNA, 25 bp, probe
tcctcagcatcaactggcaggacgt

SEQ ID NO: 277035 - DNA, 25 bp, probe
tcctcatgatgtagctggcttccgt

SEQ ID NO: 277036 - DNA, 25 bp, probe
tcctgcagaatgggagctaccgctg

SEQ ID NO: 277037 - DNA, 25 bp, probe
tcctcagattgctgaatcccatcag

SEQ ID NO: 277038 - DNA, 25 bp, probe
tcctgcagcctgtggatgtcctgca

SEQ ID NO: 277039 - DNA, 25 bp, probe
tcctggccttcagggtcaccaggtg

SEQ ID NO: 277040 - DNA, 25 bp, probe
tcctggtcactgatggtctccagag

SEQ ID NO: 277041 - DNA, 25 bp, probe
tcctggtagctgaggggcggaagat

SEQ ID NO: 277042 - DNA, 25 bp, probe
tcctggctaccccagagggagttgt

SEQ ID NO: 277043 - DNA, 25 bp, probe
tcctgagggcaggacagggggtttg

SEQ ID NO: 277044 - DNA, 25 bp, probe
tcctgatggcccaaatgtcagggtt

SEQ ID NO: 277045 - DNA, 25 bp, probe
tcctgctgagattcatcaatgccaa

SEQ ID NO: 277046 - DNA, 25 bp, probe
tcctgctcacagaatcacagctaag

SEQ ID NO: 277047 - DNA, 25 bp, probe
tcctcagtcactacatcactcaagt

SEQ ID NO: 277048 - DNA, 25 bp, probe
tcctcagtcactacatcactcaagt

SEQ ID NO: 277049 - DNA, 25 bp, probe
tcctcaggagctctcagaaagcttt

SEQ ID NO: 277050 - DNA, 25 bp, probe
tcctcagggctctaccaagacataa

SEQ ID NO: 277051 - DNA, 25 bp, probe
tcctcagggctctaccaagacataa

SEQ ID NO: 277052 - DNA, 25 bp, probe
tcctcgggctcttcaggagactgag

SEQ ID NO: 277053 - DNA, 25 bp, probe
tcctccaagctttacatagtcatca

SEQ ID NO: 277054 - DNA, 25 bp, probe
tcctccaacaataaagagctcaagt

SEQ ID NO: 277055 - DNA, 25 bp, probe
tccccagccatttagaaacaagttc

SEQ ID NO: 277056 - DNA, 25 bp, probe
tccgggcctttctcaacagaggatg

SEQ ID NO: 277057 - DNA, 25 bp, probe
tcctgggcctttgcaagatgcttgg

SEQ ID NO: 277058 - DNA, 25 bp, probe
tcctgggcatccaccatgatgctgt

SEQ ID NO: 277059 - DNA, 25 bp, probe
tcctgaggatccatcatatagttca

SEQ ID NO: 277060 - DNA, 25 bp, probe
tcctgtgcatttagattaagttcat

SEQ ID NO: 277061 - DNA, 25 bp, probe
tcctgtctcccgatgaaaacatatc

SEQ ID NO: 277062 - DNA, 25 bp, probe
tccgtctctaccaatatacaaaaat

SEQ ID NO: 277063 - DNA, 25 bp, probe
tcctgctttacaggatcatgtaaat

SEQ ID NO: 277064 - DNA, 25 bp, probe
tcctgtgctatgctggacattaaca

SEQ ID NO: 277065 - DNA, 25 bp, probe
tcctgtgctatgctggacattaaca

SEQ ID NO: 277066 - DNA, 25 bp, probe
tcctctgcaaggagaactgagaaga

SEQ ID NO: 277067 - DNA, 25 bp, probe
tcctccaaggatgctgtgtagataa

SEQ ID NO: 277068 - DNA, 25 bp, probe
tcctccagatggttgctgatgggat

SEQ ID NO: 277069 - DNA, 25 bp, probe
tcctcaggcagaattgctggtggag

SEQ ID NO: 277070 - DNA, 25 bp, probe
tcctccagccagatggtggtgatga

SEQ ID NO: 277071 - DNA, 25 bp, probe
tcctccccgttctagggatgtacca

SEQ ID NO: 277072 - DNA, 25 bp, probe
tcctctcccgcttcgatgaggagga

SEQ ID NO: 277073 - DNA, 25 bp, probe
tcctctacgtcttcgttggcagaga

SEQ ID NO: 277074 - DNA, 25 bp, probe
tcctccaaagttgcttgcagtgctg

SEQ ID NO: 277075 - DNA, 25 bp, probe
tcctctacaatgatggtgacagcct

SEQ ID NO: 277076 - DNA, 25 bp, probe
tccccactagaaggtacgctctaca

SEQ ID NO: 277077 - DNA, 25 bp, probe
tcctctcctaaagatctcatgctca

SEQ ID NO: 277078 - DNA, 25 bp, probe
tcctctcctaaagatctcatgctca

SEQ ID NO: 277079 - DNA, 25 bp, probe
tcctgtcctacggatgcattctggc

SEQ ID NO: 277080 - DNA, 25 bp, probe
tcctgtcctacggatgcattctggc

SEQ ID NO: 277081 - DNA, 25 bp, probe
tcctctccgcagccagaaatgctgc

SEQ ID NO: 277082 - DNA, 25 bp, probe
tcctctccgcagccagaaatgctgc

SEQ ID NO: 277083 - DNA, 25 bp, probe
tcctctcacagcccaaattctgaag

SEQ ID NO: 277084 - DNA, 25 bp, probe
tcctccacctcagaatcatctggga

SEQ ID NO: 277085 - DNA, 25 bp, probe
tcctccccccaaatattgggcagcc

SEQ ID NO: 277086 - DNA, 25 bp, probe
tcctgcccaaactggatgggacacg

SEQ ID NO: 277087 - DNA, 25 bp, probe
tcctcctcaaaccagttgtacagcc

SEQ ID NO: 277088 - DNA, 25 bp, probe
tcctctcgaaagccagctttacctc

SEQ ID NO: 277089 - DNA, 25 bp, probe
tcctctcgaaagccagctttacctc

SEQ ID NO: 277090 - DNA, 25 bp, probe
tcccggaaaagtctctgagctgctc

SEQ ID NO: 277091 - DNA, 25 bp, probe
tcccgtgcaaaaagggtcacgcctc

SEQ ID NO: 277092 - DNA, 25 bp, probe
tcccctgaaaatcatgttcccttct

SEQ ID NO: 277093 - DNA, 25 bp, probe
tcctgctcaattccagtatgtaccc

SEQ ID NO: 277094 - DNA, 25 bp, probe
tcctgctcagtacgagaggaaccgc

SEQ ID NO: 277095 - DNA, 25 bp, probe
tcctctcatgtctagaatgggcatc

SEQ ID NO: 277096 - DNA, 25 bp, probe
tcctcatgctgtttagtgatggcac

SEQ ID NO: 277097 - DNA, 25 bp, probe
tcctggcgataatgtgtgtctcctg

SEQ ID NO: 277098 - DNA, 25 bp, probe
tcctgggagccatggtggtcctggc

SEQ ID NO: 277099 - DNA, 25 bp, probe
tcctgggcagagtgcgaagctccgg

SEQ ID NO: 277100 - DNA, 25 bp, probe
tccggggcaatacagaccatcaagc

SEQ ID NO: 277101 - DNA, 25 bp, probe
tccgagagcggattgagttcctcaa

SEQ ID NO: 277102 - DNA, 25 bp, probe
tccgagagcggattgagttcctcaa

SEQ ID NO: 277103 - DNA, 25 bp, probe
tcctgccagaaattcatttcctaaa

SEQ ID NO: 277104 - DNA, 25 bp, probe
tcctctgaggaagcattctgacttc

SEQ ID NO: 277105 - DNA, 25 bp, probe
tcctctataggagatgagcttcatt

SEQ ID NO: 277106 - DNA, 25 bp, probe
tcctctataggagatgagcttcatt

SEQ ID NO: 277107 - DNA, 25 bp, probe
tcctctacagaagtggtgtctacta

SEQ ID NO: 277108 - DNA, 25 bp, probe
tcctctgacgaatgggtatattgaa

SEQ ID NO: 277109 - DNA, 25 bp, probe
tcctctgggaaatcgccactggaga

SEQ ID NO: 277110 - DNA, 25 bp, probe
tcctctgggaaatcgccactggaga

SEQ ID NO: 277111 - DNA, 25 bp, probe
tctaccgtggaatgtccctggagta

SEQ ID NO: 277112 - DNA, 25 bp, probe
tccccgtccaaaacttctacagtga

SEQ ID NO: 277113 - DNA, 25 bp, probe
tccccctgaacaatccttttcagta

SEQ ID NO: 277114 - DNA, 25 bp, probe
tcctctccagcatctttattttatt

SEQ ID NO: 277115 - DNA, 25 bp, probe
tcctccaagatactttgcagccttt

SEQ ID NO: 277116 - DNA, 25 bp, probe
tcctccttgctgatttgcacacatt

SEQ ID NO: 277117 - DNA, 25 bp, probe
tcctgcctttgatcattcaccaaac

SEQ ID NO: 277118 - DNA, 25 bp, probe
tcctgctgctgtagagttttcccaa

SEQ ID NO: 277119 - DNA, 25 bp, probe
tcctgcttttggctttaccatatgt

SEQ ID NO: 277120 - DNA, 25 bp, probe
tcctgcttttggctttaccatatgt

SEQ ID NO: 277121 - DNA, 25 bp, probe
tcctgtcttttgacatttgactttg

SEQ ID NO: 277122 - DNA, 25 bp, probe
tcctgtctttgaataatccactcat

SEQ ID NO: 277123 - DNA, 25 bp, probe
tcctgctttcagataattattccag

SEQ ID NO: 277124 - DNA, 25 bp, probe
tcctgttttttgtctatgtcccagc

SEQ ID NO: 277125 - DNA, 25 bp, probe
tcccctttgtgtgcttttggagcgg

SEQ ID NO: 277126 - DNA, 25 bp, probe
tccccaagtgggcctgatttagcag

SEQ ID NO: 277127 - DNA, 25 bp, probe
tccccaagtgggcctgatttagcag

SEQ ID NO: 277128 - DNA, 25 bp, probe
tcctccactgggtccgaatcagtag

SEQ ID NO: 277129 - DNA, 25 bp, probe
tcctccaggtggtcacactgtggta

SEQ ID NO: 277130 - DNA, 25 bp, probe
tcctgcccatgtgacatccgcaggt

SEQ ID NO: 277131 - DNA, 25 bp, probe
tcctctacagtctcatcggcaggaa

SEQ ID NO: 277132 - DNA, 25 bp, probe
tcctctacgcctttctagatgacaa

SEQ ID NO: 277133 - DNA, 25 bp, probe
tcctctccaccaagatctaaatcca

SEQ ID NO: 277134 - DNA, 25 bp, probe
tcccttcccataagctatagacccg

SEQ ID NO: 277135 - DNA, 25 bp, probe
tcctcctccttaggatgcataacct

SEQ ID NO: 277136 - DNA, 25 bp, probe
tcctcccacattccgaaaaccagag

SEQ ID NO: 277137 - DNA, 25 bp, probe
tcctgactaattccagaattatcaa

SEQ ID NO: 277138 - DNA, 25 bp, probe
tcctgcactctaaggagatcatcta

SEQ ID NO: 277139 - DNA, 25 bp, probe
tcctgcctcttatggtgatgcttat

SEQ ID NO: 277140 - DNA, 25 bp, probe
tcctgtctgctttgtgaggcagtct

SEQ ID NO: 277141 - DNA, 25 bp, probe
tcctgccagcttgggggagtgttcc

SEQ ID NO: 277142 - DNA, 25 bp, probe
tccggctggtgttctgagggttgcc

SEQ ID NO: 277143 - DNA, 25 bp, probe
tcctgccggatgagtgtgggtgtga

SEQ ID NO: 277144 - DNA, 25 bp, probe
tcctgctgggcacagtgggcaatgg

SEQ ID NO: 277145 - DNA, 25 bp, probe
tcctgcaggagtcagcgttcaatct

SEQ ID NO: 277146 - DNA, 25 bp, probe
tcctcgggatggtcgatcacaactg

SEQ ID NO: 277147 - DNA, 25 bp, probe
tcctgggtatgggctacaaagagaa

SEQ ID NO: 277148 - DNA, 25 bp, probe
tcctgcatggtatcactaaaggttt

SEQ ID NO: 277149 - DNA, 25 bp, probe
tcctccgttatacaaggagctcttt

SEQ ID NO: 277150 - DNA, 25 bp, probe
tcccgagttgtgtccaacgattcgg

SEQ ID NO: 277151 - DNA, 25 bp, probe
tcctctctgtttttaactattctgg

SEQ ID NO: 277152 - DNA, 25 bp, probe
tcctctgttgattttttcttttgct

SEQ ID NO: 277153 - DNA, 25 bp, probe
tcctcgagctctatttttactgtct

SEQ ID NO: 277154 - DNA, 25 bp, probe
tcctcgagctctatttttactgtct

SEQ ID NO: 277155 - DNA, 25 bp, probe
tccctcacttttgttttctgtttat

SEQ ID NO: 277156 - DNA, 25 bp, probe
tcacctcctattctcttaatttttg

SEQ ID NO: 277157 - DNA, 25 bp, probe
tccccctaaaagcgaatgtttgtgt

SEQ ID NO: 277158 - DNA, 25 bp, probe
tctccccaaggagggggctagcttg

SEQ ID NO: 277159 - DNA, 25 bp, probe
tcctccaacgggtggcgctagaggc

SEQ ID NO: 277160 - DNA, 25 bp, probe
tcctccgcacgggtcgaccagcaga

SEQ ID NO: 277161 - DNA, 25 bp, probe
tcctgcccacgggaggacaagcaat

SEQ ID NO: 277162 - DNA, 25 bp, probe
tcctcccacaggaagaaatgtacat

SEQ ID NO: 277163 - DNA, 25 bp, probe
tcctccaccatggaagtcagttcct

SEQ ID NO: 277164 - DNA, 25 bp, probe
tcctccacctgcgaaggtattctaa

SEQ ID NO: 277165 - DNA, 25 bp, probe
tcctcccgattattgcgtattctaa

SEQ ID NO: 277166 - DNA, 25 bp, probe
tccccaggattatgcgcgattcaag

SEQ ID NO: 277167 - DNA, 25 bp, probe
tcctccagcgatgtacgcactgtca

SEQ ID NO: 277168 - DNA, 25 bp, probe
tcctccagcgatgtacgcactgtca

SEQ ID NO: 277169 - DNA, 25 bp, probe
tcctccagcgatgtacgcactgtca

SEQ ID NO: 277170 - DNA, 25 bp, probe
tcctccagaatattccgttctgctt

SEQ ID NO: 277171 - DNA, 25 bp, probe
tcctccagaatattccgttctgctt

SEQ ID NO: 277172 - DNA, 25 bp, probe
tcctccaagaaccctggttgcttgc

SEQ ID NO: 277173 - DNA, 25 bp, probe
tcccaaatggaccctgtggggtata

SEQ ID NO: 277174 - DNA, 25 bp, probe
tcaccccggcacccaggggtggata

SEQ ID NO: 277175 - DNA, 25 bp, probe
tcccccaacacccaggaatgggaat

SEQ ID NO: 277176 - DNA, 25 bp, probe
ttccccccaacctgggatgaaatct

SEQ ID NO: 277177 - DNA, 25 bp, probe
tacacggcccaagagggggccaagt

SEQ ID NO: 277178 - DNA, 25 bp, probe
tcccgcgcccaagaagggctcgaag

SEQ ID NO: 277179 - DNA, 25 bp, probe
tccgccacctaggaaaggagggaga

SEQ ID NO: 277180 - DNA, 25 bp, probe
tccccaactacatgtaccagcggaa

SEQ ID NO: 277181 - DNA, 25 bp, probe
tcgccacaaatatgggtactgcgga

SEQ ID NO: 277182 - DNA, 25 bp, probe
tccccaccaaggggtactgcagggg

SEQ ID NO: 277183 - DNA, 25 bp, probe
tcccgcccgaggagaaccagcggca

SEQ ID NO: 277184 - DNA, 25 bp, probe
tcccaccaagggggaaccccagcag

SEQ ID NO: 277185 - DNA, 25 bp, probe
tccgaccctcggggtaatgaccaca

SEQ ID NO: 277186 - DNA, 25 bp, probe
tcggccttccgtgatggaaaccact

SEQ ID NO: 277187 - DNA, 25 bp, probe
tcctgcctgtgggttcggaaagccc

SEQ ID NO: 277188 - DNA, 25 bp, probe
tcctgagtgctggacctcattaaag

SEQ ID NO: 277189 - DNA, 25 bp, probe
tcctgcagtgttgcccagtcaataa

SEQ ID NO: 277190 - DNA, 25 bp, probe
tcctgcagtgttgcccagtcaataa

SEQ ID NO: 277191 - DNA, 25 bp, probe
tcctgagtgtcatcaacctcctaga

SEQ ID NO: 277192 - DNA, 25 bp, probe
tcctgagtgtcatcaacctcctaga

SEQ ID NO: 277193 - DNA, 25 bp, probe
tcctgcacaagatcaagcaccccaa

SEQ ID NO: 277194 - DNA, 25 bp, probe
tcctcccagtcattgaaacaccaaa

SEQ ID NO: 277195 - DNA, 25 bp, probe
tccgccagatgtgctgcaaaacctg

SEQ ID NO: 277196 - DNA, 25 bp, probe
tcctccagagtcagaagtttctgcc

SEQ ID NO: 277197 - DNA, 25 bp, probe
tccccagtttgtatttagctgccaa

SEQ ID NO: 277198 - DNA, 25 bp, probe
tacgcgtgttttatattaggacgac

SEQ ID NO: 277199 - DNA, 25 bp, probe
taaaggagtttcagttcttactact

SEQ ID NO: 277200 - DNA, 25 bp, probe
taaaggagtttcagttcttactact

SEQ ID NO: 277201 - DNA, 25 bp, probe
ttcctggagtccacgtttaactcct

SEQ ID NO: 277202 - DNA, 25 bp, probe
tccgtgggtcacaggtaaagcagcc

SEQ ID NO: 277203 - DNA, 25 bp, probe
tccgatggcgtcaggaatttcagcc

SEQ ID NO: 277204 - DNA, 25 bp, probe
tccgagagtgctcggcaggacttcc

SEQ ID NO: 277205 - DNA, 25 bp, probe
tccggcatgtgcaaggccggcttcg

SEQ ID NO: 277206 - DNA, 25 bp, probe
tcctggtttgggggctctttggatg

SEQ ID NO: 277207 - DNA, 25 bp, probe
tcctgttgtgaggggctcactttgg

SEQ ID NO: 277208 - DNA, 25 bp, probe
tcctgattatggggtctcctgaata

SEQ ID NO: 277209 - DNA, 25 bp, probe
tcctgattatggggtctcctgaata

SEQ ID NO: 277210 - DNA, 25 bp, probe
tcctgttcatgtacgaccctaagaa

SEQ ID NO: 277211 - DNA, 25 bp, probe
tcctgttcatgtacgaccctaagaa

SEQ ID NO: 277212 - DNA, 25 bp, probe
tcctgttcatgtacgaccctaagaa

SEQ ID NO: 277213 - DNA, 25 bp, probe
tccccacatggaggacccaacagga

SEQ ID NO: 277214 - DNA, 25 bp, probe
tcccccatgaactccacaatcaggg

SEQ ID NO: 277215 - DNA, 25 bp, probe
tcccccatgaactccacaatcaggg

SEQ ID NO: 277216 - DNA, 25 bp, probe
tcccctcagcaattcctgcaaaggg

SEQ ID NO: 277217 - DNA, 25 bp, probe
tccgttctgccatccggaagaggtg

SEQ ID NO: 277218 - DNA, 25 bp, probe
tcctgaacgacatcaccgaggagtg

SEQ ID NO: 277219 - DNA, 25 bp, probe
tcctgaaggtcaaaccggaggagag

SEQ ID NO: 277220 - DNA, 25 bp, probe
tccgacagcgacaccaggtttgaga

SEQ ID NO: 277221 - DNA, 25 bp, probe
tcctgacaggccagccactgtggcc

SEQ ID NO: 277222 - DNA, 25 bp, probe
tcctgacaggccagccactgtggcc

SEQ ID NO: 277223 - DNA, 25 bp, probe
tcctccacaagcacgacttggacct

SEQ ID NO: 277224 - DNA, 25 bp, probe
tcctccacttgaaaccttatgattt

SEQ ID NO: 277225 - DNA, 25 bp, probe
tcccccactatgcatatcttatcat

SEQ ID NO: 277226 - DNA, 25 bp, probe
tcccgacacacaccatgcataaaat

SEQ ID NO: 277227 - DNA, 25 bp, probe
tccgacatcaaaacacgaaaatctg

SEQ ID NO: 277228 - DNA, 25 bp, probe
tccggcgcataaagtcagcaaggtt

SEQ ID NO: 277229 - DNA, 25 bp, probe
tcctgtgcaaatagtgtcaaaagta

SEQ ID NO: 277230 - DNA, 25 bp, probe
tcctggattgtgaagctagaactgt

SEQ ID NO: 277231 - DNA, 25 bp, probe
tcctggctatcgagtctgaatctgc

SEQ ID NO: 277232 - DNA, 25 bp, probe
tcctggacattgggcctatattgca

SEQ ID NO: 277233 - DNA, 25 bp, probe
tcctgtatgttgtccaattgttgac

SEQ ID NO: 277234 - DNA, 25 bp, probe
tcctgttgcttaccagatcttacag

SEQ ID NO: 277235 - DNA, 25 bp, probe
tccgttgctgtcggcagtttgggga

SEQ ID NO: 277236 - DNA, 25 bp, probe
tcccattttcgaggctccttataag

SEQ ID NO: 277237 - DNA, 25 bp, probe
tcccattttcgaggctccttataag

SEQ ID NO: 277238 - DNA, 25 bp, probe
tcccggttggaacctgcaataaact

SEQ ID NO: 277239 - DNA, 25 bp, probe
tcctgggtctgcaactttggaaaac

SEQ ID NO: 277240 - DNA, 25 bp, probe
tccgattgctggaatctttggaaga

SEQ ID NO: 277241 - DNA, 25 bp, probe
tcctgttgaggatgctttctgtaaa

SEQ ID NO: 277242 - DNA, 25 bp, probe
tccgtggtgagatcttcttcttcaa

SEQ ID NO: 277243 - DNA, 25 bp, probe
tcctgcaagggatccatttctggac

SEQ ID NO: 277244 - DNA, 25 bp, probe
tcctgcaaagcgatccaagtttgac

SEQ ID NO: 277245 - DNA, 25 bp, probe
tcctgaagagccactcattttgttc

SEQ ID NO: 277246 - DNA, 25 bp, probe
tcctgcacagacatgtccataactg

SEQ ID NO: 277247 - DNA, 25 bp, probe
tcctgcacagacatgtccataactg

SEQ ID NO: 277248 - DNA, 25 bp, probe
tcctgaacaaaggccatgacatttc

SEQ ID NO: 277249 - DNA, 25 bp, probe
tcctgaacaacatcggacacatccg

SEQ ID NO: 277250 - DNA, 25 bp, probe
tcctgaacaacatcggacacatccg

SEQ ID NO: 277251 - DNA, 25 bp, probe
tcctggcacctcaactgtgacaatc

SEQ ID NO: 277252 - DNA, 25 bp, probe
tcctgctccacctagctgtagcaga

SEQ ID NO: 277253 - DNA, 25 bp, probe
tcctgtcccaggattagcagagtgg

SEQ ID NO: 277254 - DNA, 25 bp, probe
tcctgatcccgatgttagaaatggt

SEQ ID NO: 277255 - DNA, 25 bp, probe
tcctgatcccactctttggaattca

SEQ ID NO: 277256 - DNA, 25 bp, probe
tcctgatttcactaccttttgttca

SEQ ID NO: 277257 - DNA, 25 bp, probe
tcctgttccatttcagttcagtttc

SEQ ID NO: 277258 - DNA, 25 bp, probe
tcctgcttctgatatgcagttttcc

SEQ ID NO: 277259 - DNA, 25 bp, probe
tccgcatgctaatcgctttttaccg

SEQ ID NO: 277260 - DNA, 25 bp, probe
tccgtgtaagggctttgatgccagc

SEQ ID NO: 277261 - DNA, 25 bp, probe
tccgtgtggatcggcggctccatcc

SEQ ID NO: 277262 - DNA, 25 bp, probe
tcctggtgtggaccggaagcatccc

SEQ ID NO: 277263 - DNA, 25 bp, probe
tcctggtgtggaccggaagcatccc

SEQ ID NO: 277264 - DNA, 25 bp, probe
tcctggttgctctcaggaggctcca

SEQ ID NO: 277265 - DNA, 25 bp, probe
tcctgcagttccttcaggggactgg

SEQ ID NO: 277266 - DNA, 25 bp, probe
tcctgcagtcggtgctggaggactt

SEQ ID NO: 277267 - DNA, 25 bp, probe
tcctgcccaggcattggaggcaatc

SEQ ID NO: 277268 - DNA, 25 bp, probe
tcccccaggcctaggatcagggacc

SEQ ID NO: 277269 - DNA, 25 bp, probe
tcttccggaacgagacggtggacgt

SEQ ID NO: 277270 - DNA, 25 bp, probe
tcgtccggaaaaggggtctggtgtg

SEQ ID NO: 277271 - DNA, 25 bp, probe
tcgcctcggaatccaaggtgtaggg

SEQ ID NO: 277272 - DNA, 25 bp, probe
tcccctaaataatgtgctctccggc

SEQ ID NO: 277273 - DNA, 25 bp, probe
tcccgtaaatctcaggcttctggtg

SEQ ID NO: 277274 - DNA, 25 bp, probe
tcccctggttatcagccaccaggct

SEQ ID NO: 277275 - DNA, 25 bp, probe
tcccctggttatcagccaccaggct

SEQ ID NO: 277276 - DNA, 25 bp, probe
tccctatgggttctgtgaccactgc

SEQ ID NO: 277277 - DNA, 25 bp, probe
tccgtggtggacacagagacctgcc

SEQ ID NO: 277278 - DNA, 25 bp, probe
tccgaaggtcaaggaagacctgccc

SEQ ID NO: 277279 - DNA, 25 bp, probe
tccgccttgtggagaaatcctgccc

SEQ ID NO: 277280 - DNA, 25 bp, probe
tccccaaatgaggcaggaatccccc

SEQ ID NO: 277281 - DNA, 25 bp, probe
tccccaaacagaacagcactaccac

SEQ ID NO: 277282 - DNA, 25 bp, probe
tccccaaacagaacagcactaccac

SEQ ID NO: 277283 - DNA, 25 bp, probe
tccccaaaagttaactggctctcct

SEQ ID NO: 277284 - DNA, 25 bp, probe
tcccctatataatttactttcttct

SEQ ID NO: 277285 - DNA, 25 bp, probe
tcaccctaataatatacgttgtacc

SEQ ID NO: 277286 - DNA, 25 bp, probe
tccctctaattatttaagattggaa

SEQ ID NO: 277287 - DNA, 25 bp, probe
tcgccttcacttctacaggagggga

SEQ ID NO: 277288 - DNA, 25 bp, probe
tcgccttcacttctacaggagggga

SEQ ID NO: 277289 - DNA, 25 bp, probe
tcgccttcacttctacaggagggga

SEQ ID NO: 277290 - DNA, 25 bp, probe
tcccttacgtgagtcctggcatggg

SEQ ID NO: 277291 - DNA, 25 bp, probe
tcccttacgtgagtcctggcatggg

SEQ ID NO: 277292 - DNA, 25 bp, probe
tcctgggacccatcctggatggggc

SEQ ID NO: 277293 - DNA, 25 bp, probe
tcctgtggaatcagacctccaggag

SEQ ID NO: 277294 - DNA, 25 bp, probe
tcacagggaacaagacacggctggg

SEQ ID NO: 277295 - DNA, 25 bp, probe
tccggagatacctactcaggcggca

SEQ ID NO: 277296 - DNA, 25 bp, probe
tccgggaccgaaatagccggcagcc

SEQ ID NO: 277297 - DNA, 25 bp, probe
tccgggaccgaaatagccggcagcc

SEQ ID NO: 277298 - DNA, 25 bp, probe
tccgcgagccgggattacagggtct

SEQ ID NO: 277299 - DNA, 25 bp, probe
tccgcgagccgggattacagggtct

SEQ ID NO: 277300 - DNA, 25 bp, probe
tcctggtccactgtgaagctgggtt

SEQ ID NO: 277301 - DNA, 25 bp, probe
tcctggtccactgtgaggctggaat

SEQ ID NO: 277302 - DNA, 25 bp, probe
tcctgtcccttcttgggatgagaat

SEQ ID NO: 277303 - DNA, 25 bp, probe
tccgaggctgcttttgggaggactt

SEQ ID NO: 277304 - DNA, 25 bp, probe
tccgaggctgcttttgggaggactt

SEQ ID NO: 277305 - DNA, 25 bp, probe
tcctgggcatggtgatcggaggcac

SEQ ID NO: 277306 - DNA, 25 bp, probe
tcctgtggtgtccatgaggtaccac

SEQ ID NO: 277307 - DNA, 25 bp, probe
tccgtggtcatgtgcatgggcacca

SEQ ID NO: 277308 - DNA, 25 bp, probe
tcctgggtcatgagaaggcccctgc

SEQ ID NO: 277309 - DNA, 25 bp, probe
tcctgggtgtgtcagaggccagcct

SEQ ID NO: 277310 - DNA, 25 bp, probe
tcctgggtgtgtcagaggccagcct

SEQ ID NO: 277311 - DNA, 25 bp, probe
tccgtcttgtgtcatgtgttcagct

SEQ ID NO: 277312 - DNA, 25 bp, probe
tcccactcggtgctgttgggtaggg

SEQ ID NO: 277313 - DNA, 25 bp, probe
tcacgcctggggagttggaagcagt

SEQ ID NO: 277314 - DNA, 25 bp, probe
tcctgctcgtgcttaagattgatga

SEQ ID NO: 277315 - DNA, 25 bp, probe
tcctgcttgatgcacacatgaatgc

SEQ ID NO: 277316 - DNA, 25 bp, probe
tccgcattgacgtcattgtgcatgg

SEQ ID NO: 277317 - DNA, 25 bp, probe
tccgggaggtcaatgccatgcactc

SEQ ID NO: 277318 - DNA, 25 bp, probe
tcctggggagatgctgccagcacac

SEQ ID NO: 277319 - DNA, 25 bp, probe
tcctgggtcaaggatgctcacatcc

SEQ ID NO: 277320 - DNA, 25 bp, probe
tcccctgtatgacatctcagcaact

SEQ ID NO: 277321 - DNA, 25 bp, probe
tcccctgtatttcccacatatatat

SEQ ID NO: 277322 - DNA, 25 bp, probe
tcctgggattcaacccactattact

SEQ ID NO: 277323 - DNA, 25 bp, probe
tcctgggattcaaacctgcatattg

SEQ ID NO: 277324 - DNA, 25 bp, probe
tcctgtggctctgaacttcatgaag

SEQ ID NO: 277325 - DNA, 25 bp, probe
tcctggaccccaaagtgatcaagat

SEQ ID NO: 277326 - DNA, 25 bp, probe
tcctggaccccaaagtgatcaagat

SEQ ID NO: 277327 - DNA, 25 bp, probe
tccgattcccctggagtgtgaagct

SEQ ID NO: 277328 - DNA, 25 bp, probe
tccgattcccctggagtgtgaagct

SEQ ID NO: 277329 - DNA, 25 bp, probe
tccgattcccctggagtgtgaagct

SEQ ID NO: 277330 - DNA, 25 bp, probe
tcctgcaccagctctgcaggctgga

SEQ ID NO: 277331 - DNA, 25 bp, probe
tcctgtctgacacctggagcatggg

SEQ ID NO: 277332 - DNA, 25 bp, probe
tcctgttgctgccgtgaagtcagga

SEQ ID NO: 277333 - DNA, 25 bp, probe
tcctgcacatgggtgtgaatgcaca

SEQ ID NO: 277334 - DNA, 25 bp, probe
tcctggcaggcactgtggacaccca

SEQ ID NO: 277335 - DNA, 25 bp, probe
tcctggcagacaagtcggccgccag

SEQ ID NO: 277336 - DNA, 25 bp, probe
tcctggcagacaagtcggccgccag

SEQ ID NO: 277337 - DNA, 25 bp, probe
tcctgggacaactagggctgcgaat

SEQ ID NO: 277338 - DNA, 25 bp, probe
tccccaacaccgacggcatggagat

SEQ ID NO: 277339 - DNA, 25 bp, probe
tccgccgaggtgctcggtggagtca

SEQ ID NO: 277340 - DNA, 25 bp, probe
tcctgggaggatcctgggagaagga

SEQ ID NO: 277341 - DNA, 25 bp, probe
tcctggagggcctcctgagaaggac

SEQ ID NO: 277342 - DNA, 25 bp, probe
tcctggggacgctgtcacaggggac

SEQ ID NO: 277343 - DNA, 25 bp, probe
tcctggggacgctgtcacaggggac

SEQ ID NO: 277344 - DNA, 25 bp, probe
tcctggggcatcgggtgcagcaggg

SEQ ID NO: 277345 - DNA, 25 bp, probe
tcctgggttctggggcatcagccag

SEQ ID NO: 277346 - DNA, 25 bp, probe
tcctgggttctggggcatcagccag

SEQ ID NO: 277347 - DNA, 25 bp, probe
tcctgtgcgtccgagaggcaacaag

SEQ ID NO: 277348 - DNA, 25 bp, probe
tcctggctgtcaccaagtaggaaga

SEQ ID NO: 277349 - DNA, 25 bp, probe
tcctggttcatggaagccatagagt

SEQ ID NO: 277350 - DNA, 25 bp, probe
tcctgggctctgcagagcaaactgg

SEQ ID NO: 277351 - DNA, 25 bp, probe
tcctggccctgccggaagaagaggc

SEQ ID NO: 277352 - DNA, 25 bp, probe
tcctggcagttgcctctcaggaaga

SEQ ID NO: 277353 - DNA, 25 bp, probe
tcctgaggatcccctcagctgaggg

SEQ ID NO: 277354 - DNA, 25 bp, probe
tcctgaggatcccctcagctgaggg

SEQ ID NO: 277355 - DNA, 25 bp, probe
tcctgaggcacgcctgacagctgag

SEQ ID NO: 277356 - DNA, 25 bp, probe
tcctgcagtcacctatacattattt

SEQ ID NO: 277357 - DNA, 25 bp, probe
tcctgcagtatgctgctaacatctt

SEQ ID NO: 277358 - DNA, 25 bp, probe
tcgctcattccaactaatcatcatc

SEQ ID NO: 277359 - DNA, 25 bp, probe
tcgatgccatccagcaagacttcgt

SEQ ID NO: 277360 - DNA, 25 bp, probe
tcctgcaacctcaagagacttccca

SEQ ID NO: 277361 - DNA, 25 bp, probe
ttgctgcaaccctgagaagttactt

SEQ ID NO: 277362 - DNA, 25 bp, probe
tcccaagccctttagggctacagtc

SEQ ID NO: 277363 - DNA, 25 bp, probe
tctcccttccttgatgggggcaggg

SEQ ID NO: 277364 - DNA, 25 bp, probe
tctcccttccttgatgggggcaggg

SEQ ID NO: 277365 - DNA, 25 bp, probe
tctcctttccttctgggtggggagt

SEQ ID NO: 277366 - DNA, 25 bp, probe
tccctctacggtcagggtctggagg

SEQ ID NO: 277367 - DNA, 25 bp, probe
tcccctaccctggaggagttcagag

SEQ ID NO: 277368 - DNA, 25 bp, probe
tccccttcctggtgcaggtacatga

SEQ ID NO: 277369 - DNA, 25 bp, probe
tccccttcaaggagcctgaaaagag

SEQ ID NO: 277370 - DNA, 25 bp, probe
tcccgttaacagatcctcaaagtca

SEQ ID NO: 277371 - DNA, 25 bp, probe
tctccgattttggaacctcgaaacg

SEQ ID NO: 277372 - DNA, 25 bp, probe
tccgctgcttttggaaagtcagaaa

SEQ ID NO: 277373 - DNA, 25 bp, probe
tccgtcttttcagaagtgctgtctc

SEQ ID NO: 277374 - DNA, 25 bp, probe
tcgcgtcctggtttaaggatgtcat

SEQ ID NO: 277375 - DNA, 25 bp, probe
tctcttccaggtgaacggcatgttg

SEQ ID NO: 277376 - DNA, 25 bp, probe
tctcttccaggtgaacggcatgttg

SEQ ID NO: 277377 - DNA, 25 bp, probe
tccctccgcttcacgtggagtatga

SEQ ID NO: 277378 - DNA, 25 bp, probe
tccctccgcttcacgtggagtatga

SEQ ID NO: 277379 - DNA, 25 bp, probe
tcccccgatccaagttgtagatgga

SEQ ID NO: 277380 - DNA, 25 bp, probe
tccctccgagctagaattgtccaga

SEQ ID NO: 277381 - DNA, 25 bp, probe
tcccaacgaccgaacgatccagaat

SEQ ID NO: 277382 - DNA, 25 bp, probe
tcccgtccccagggcagatttgatt

SEQ ID NO: 277383 - DNA, 25 bp, probe
tcccctggccacagtaattggtcat

SEQ ID NO: 277384 - DNA, 25 bp, probe
tccccaagacctctatatttgctct

SEQ ID NO: 277385 - DNA, 25 bp, probe
tccccataggtcttgctttgttgcc

SEQ ID NO: 277386 - DNA, 25 bp, probe
tccccatcaggtagctgtctaaccc

SEQ ID NO: 277387 - DNA, 25 bp, probe
tccgccagggttgggaagtccttag

SEQ ID NO: 277388 - DNA, 25 bp, probe
tccgacggaggagaaggggcttcag

SEQ ID NO: 277389 - DNA, 25 bp, probe
tccggggagaagtgaggacgtcacg

SEQ ID NO: 277390 - DNA, 25 bp, probe
tcccggggaggatgaggtctcccgg

SEQ ID NO: 277391 - DNA, 25 bp, probe
tccggggcgctgcatagagtgctgt

SEQ ID NO: 277392 - DNA, 25 bp, probe
tccgtggccgagaggcaggctgtta

SEQ ID NO: 277393 - DNA, 25 bp, probe
tcctgtgtcctgggactgagggtta

SEQ ID NO: 277394 - DNA, 25 bp, probe
tcctgtgtctctgggagcggagacc

SEQ ID NO: 277395 - DNA, 25 bp, probe
tcctgaacttcttgtgggagatact

SEQ ID NO: 277396 - DNA, 25 bp, probe
tccgatactagtttgctttgctgac

SEQ ID NO: 277397 - DNA, 25 bp, probe
tcgcaaaatcggttcattcgatgag

SEQ ID NO: 277398 - DNA, 25 bp, probe
tcctgacaaggttccatctccagaa

SEQ ID NO: 277399 - DNA, 25 bp, probe
tcctgacaaggttccatctccagaa

SEQ ID NO: 277400 - DNA, 25 bp, probe
tcccagatcgtctccaattcgaaaa

SEQ ID NO: 277401 - DNA, 25 bp, probe
tcataaattggctcctttcccacaa

SEQ ID NO: 277402 - DNA, 25 bp, probe
tcaaacggtgcttctcttttaaaag

SEQ ID NO: 277403 - DNA, 25 bp, probe
tcctgactgttcctctttttaagaa

SEQ ID NO: 277404 - DNA, 25 bp, probe
tcctggtgtctacatgtttgcttag

SEQ ID NO: 277405 - DNA, 25 bp, probe
tcctgtttcatagattttgctgtta

SEQ ID NO: 277406 - DNA, 25 bp, probe
tccgtgtattattttgatttgtctg

SEQ ID NO: 277407 - DNA, 25 bp, probe
tcctgtggttcttattactgctggc

SEQ ID NO: 277408 - DNA, 25 bp, probe
tcctgggagtctggatttcagccgc

SEQ ID NO: 277409 - DNA, 25 bp, probe
tcctgggagtctggatttcagccgc

SEQ ID NO: 277410 - DNA, 25 bp, probe
tcctggaagactactttaccgcgac

SEQ ID NO: 277411 - DNA, 25 bp, probe
tcctggacatgaatgtattgtacac

SEQ ID NO: 277412 - DNA, 25 bp, probe
tcctggatgcagttgatgacatgaa

SEQ ID NO: 277413 - DNA, 25 bp, probe
tcctggatgcagttgatgacatgaa

SEQ ID NO: 277414 - DNA, 25 bp, probe
tccgagagcagcttgagcacatcaa

SEQ ID NO: 277415 - DNA, 25 bp, probe
tccgagagcagcttgagcacatcaa

SEQ ID NO: 277416 - DNA, 25 bp, probe
tccgcatgcgcagtgggctgctaac

SEQ ID NO: 277417 - DNA, 25 bp, probe
tccggctgcactggtgttgtgagat

SEQ ID NO: 277418 - DNA, 25 bp, probe
tccgcctgagcttgcatttgaaatt

SEQ ID NO: 277419 - DNA, 25 bp, probe
tccccggtgatgaggctgaattaca

SEQ ID NO: 277420 - DNA, 25 bp, probe
tccccggtgatgaggctgaattaca

SEQ ID NO: 277421 - DNA, 25 bp, probe
tcccttgcgggaagactgccaatat

SEQ ID NO: 277422 - DNA, 25 bp, probe
tcccttagggagagctcgcctctcc

SEQ ID NO: 277423 - DNA, 25 bp, probe
tcccattaggacaatcagtcccctc

SEQ ID NO: 277424 - DNA, 25 bp, probe
tcccctcaggaaacggctttgtccg

SEQ ID NO: 277425 - DNA, 25 bp, probe
tcccagctagaacccaaggtcttcc

SEQ ID NO: 277426 - DNA, 25 bp, probe
tcccagctagaacccaaggtcttcc

SEQ ID NO: 277427 - DNA, 25 bp, probe
tcccctggaagtacaaggactcatc

SEQ ID NO: 277428 - DNA, 25 bp, probe
tccccagtgacggaaagggcatgat

SEQ ID NO: 277429 - DNA, 25 bp, probe
tcctgtgcggaccggcagagaacaa

SEQ ID NO: 277430 - DNA, 25 bp, probe
tcctgtgggcacaggctgcatgcca

SEQ ID NO: 277431 - DNA, 25 bp, probe
tcctgggtgacaatgatgctgagac

SEQ ID NO: 277432 - DNA, 25 bp, probe
tcctgggctgaattatgtagacttg

SEQ ID NO: 277433 - DNA, 25 bp, probe
tccgttctgcttttgtatgagctgt

SEQ ID NO: 277434 - DNA, 25 bp, probe
tcctgttcttggtcatgtatgtggt

SEQ ID NO: 277435 - DNA, 25 bp, probe
tcctgtactgtgcatcgtgagggcc

SEQ ID NO: 277436 - DNA, 25 bp, probe
tcctggacatgcggtactgaggtgc

SEQ ID NO: 277437 - DNA, 25 bp, probe
tccggatcacggcaatgcggctgca

SEQ ID NO: 277438 - DNA, 25 bp, probe
tccggatcacggcaatgcggctgca

SEQ ID NO: 277439 - DNA, 25 bp, probe
tccgagatcagcagcaattgcctct

SEQ ID NO: 277440 - DNA, 25 bp, probe
tccgagatccaccagatcgacttga

SEQ ID NO: 277441 - DNA, 25 bp, probe
tccgcgtcccgaatgctgacattga

SEQ ID NO: 277442 - DNA, 25 bp, probe
tccctcctccagatgccaaggagct

SEQ ID NO: 277443 - DNA, 25 bp, probe
tccctccctaattccaaggatcaga

SEQ ID NO: 277444 - DNA, 25 bp, probe
tcccatcaccatcttccaggagcga

SEQ ID NO: 277445 - DNA, 25 bp, probe
tcaccccctccttcatatgaaaggt

SEQ ID NO: 277446 - DNA, 25 bp, probe
tccccctccatctctagataagtgt

SEQ ID NO: 277447 - DNA, 25 bp, probe
tcgctcctctcctacttggataact

SEQ ID NO: 277448 - DNA, 25 bp, probe
tcccacctaaaaatgtctgaatgct

SEQ ID NO: 277449 - DNA, 25 bp, probe
tcccccttcaagactgactggtctt

SEQ ID NO: 277450 - DNA, 25 bp, probe
tcccctcttacaactatcttgttca

SEQ ID NO: 277451 - DNA, 25 bp, probe
tcccctcttacaactatcttgttca

SEQ ID NO: 277452 - DNA, 25 bp, probe
tccctgtttatccaaacatcttcca

SEQ ID NO: 277453 - DNA, 25 bp, probe
tcccgttacagctggcaatcttcca

SEQ ID NO: 277454 - DNA, 25 bp, probe
tccggtctacctggacattctaggc

SEQ ID NO: 277455 - DNA, 25 bp, probe
tcccggctagccagttctctaggga

SEQ ID NO: 277456 - DNA, 25 bp, probe
tcccggctagccagttctctaggga

SEQ ID NO: 277457 - DNA, 25 bp, probe
tccgctggtgaccggttacttggga

SEQ ID NO: 277458 - DNA, 25 bp, probe
tccgctggtgaccggttacttggga

SEQ ID NO: 277459 - DNA, 25 bp, probe
tccctggtagctctcttggttgaga

SEQ ID NO: 277460 - DNA, 25 bp, probe
tcccttctatgccacgttggctgta

SEQ ID NO: 277461 - DNA, 25 bp, probe
tccctgaagtgccagcgtcggttaa

SEQ ID NO: 277462 - DNA, 25 bp, probe
tccctgaagtgccagcgtcggttaa

SEQ ID NO: 277463 - DNA, 25 bp, probe
tccctagaatctcctggaatgctta

SEQ ID NO: 277464 - DNA, 25 bp, probe
tccgctgatctactactggaggatt

SEQ ID NO: 277465 - DNA, 25 bp, probe
tccgtatcttaagtgaggaggcatg

SEQ ID NO: 277466 - DNA, 25 bp, probe
tcccttcagtgttgtacgacgatgt

SEQ ID NO: 277467 - DNA, 25 bp, probe
tccgccaagtcttggacgccgtgta

SEQ ID NO: 277468 - DNA, 25 bp, probe
tccccaattctcagggccagtgtca

SEQ ID NO: 277469 - DNA, 25 bp, probe
tccccgaactgacagcaacgattcc

SEQ ID NO: 277470 - DNA, 25 bp, probe
tccccggagctggcaaaacgctcct

SEQ ID NO: 277471 - DNA, 25 bp, probe
tccccgtgggatcaagagagacctt

SEQ ID NO: 277472 - DNA, 25 bp, probe
tccccttgggctctcagatgaaggc

SEQ ID NO: 277473 - DNA, 25 bp, probe
tcccctgatgctggtaacctgaaag

SEQ ID NO: 277474 - DNA, 25 bp, probe
tcccctgtgcatgtgcgaaggaaaa

SEQ ID NO: 277475 - DNA, 25 bp, probe
tcccctggcagaatgagatgatcga

SEQ ID NO: 277476 - DNA, 25 bp, probe
tcccctgtcaatgagaatcagatcg

SEQ ID NO: 277477 - DNA, 25 bp, probe
tctcctttgcttgaagccagaggtc

SEQ ID NO: 277478 - DNA, 25 bp, probe
tccctattctcttaagcggtggcgc

SEQ ID NO: 277479 - DNA, 25 bp, probe
tccgcgttcatcaagaacccggtgc

SEQ ID NO: 277480 - DNA, 25 bp, probe
tcccagtgtcactagaattttgaag

SEQ ID NO: 277481 - DNA, 25 bp, probe
tcccattccatcttagtgtcctgga

SEQ ID NO: 277482 - DNA, 25 bp, probe
tcccagtgcgaaggggcccatgggt

SEQ ID NO: 277483 - DNA, 25 bp, probe
tccgtggcgggcggatgacactggg

SEQ ID NO: 277484 - DNA, 25 bp, probe
tcctggggtccagaaccatgagatg

SEQ ID NO: 277485 - DNA, 25 bp, probe
tcccgggcccatgatggccatagat

SEQ ID NO: 277486 - DNA, 25 bp, probe
tccctggggcctggtgggtaggcaa

SEQ ID NO: 277487 - DNA, 25 bp, probe
tccctggccttgggtgggattgagt

SEQ ID NO: 277488 - DNA, 25 bp, probe
tccctggcgcttgaggctcagaaga

SEQ ID NO: 277489 - DNA, 25 bp, probe
tcccttcctttaactcagaggcggg

SEQ ID NO: 277490 - DNA, 25 bp, probe
tcccttccttttgttaacgtgatgt

SEQ ID NO: 277491 - DNA, 25 bp, probe
tccctatcctagcttttaacctgag

SEQ ID NO: 277492 - DNA, 25 bp, probe
tccctatcctggggtccagaaccat

SEQ ID NO: 277493 - DNA, 25 bp, probe
tccgctacctgggtgttgaggccca

SEQ ID NO: 277494 - DNA, 25 bp, probe
tccgctacctgggtgttgaggccca

SEQ ID NO: 277495 - DNA, 25 bp, probe
tccgctacctgggtgttgaggccca

SEQ ID NO: 277496 - DNA, 25 bp, probe
tccgctccacagggattctggagac

SEQ ID NO: 277497 - DNA, 25 bp, probe
tcgctctcgccgagtttgttagccg

SEQ ID NO: 277498 - DNA, 25 bp, probe
tcgctctcgccgagtttgttagccg

SEQ ID NO: 277499 - DNA, 25 bp, probe
tccctggcatcgtgtattccatatg

SEQ ID NO: 277500 - DNA, 25 bp, probe
tcccttctagtctttatttatggtc

SEQ ID NO: 277501 - DNA, 25 bp, probe
tcgcgtctctacgacttttttgacc

SEQ ID NO: 277502 - DNA, 25 bp, probe
tcgaatctgtgacaatctttttatc

SEQ ID NO: 277503 - DNA, 25 bp, probe
tcgcttcttgaagacctatgtaaag

SEQ ID NO: 277504 - DNA, 25 bp, probe
tcctgtcctatataccctctagaaa

SEQ ID NO: 277505 - DNA, 25 bp, probe
tcccctctgatattcaaccctatag

SEQ ID NO: 277506 - DNA, 25 bp, probe
tccgccttgtaaaaccactggacag

SEQ ID NO: 277507 - DNA, 25 bp, probe
tccccacgataagcaccagtgggac

SEQ ID NO: 277508 - DNA, 25 bp, probe
tccccactgcaagacaacctggtta

SEQ ID NO: 277509 - DNA, 25 bp, probe
tccctcaacaaggtatacctcagtt

SEQ ID NO: 277510 - DNA, 25 bp, probe
tcccatcctaatcatccaatgctca

SEQ ID NO: 277511 - DNA, 25 bp, probe
tcccatcaattcttgtgccaatcca

SEQ ID NO: 277512 - DNA, 25 bp, probe
tcccataatagcttccagtattcat

SEQ ID NO: 277513 - DNA, 25 bp, probe
tcccatatatagttcagccttaata

SEQ ID NO: 277514 - DNA, 25 bp, probe
tcccagctaaggcctcctataaaca

SEQ ID NO: 277515 - DNA, 25 bp, probe
tccggcttggctagtcacatatcaa

SEQ ID NO: 277516 - DNA, 25 bp, probe
tcctggccacagaatgctaatacta

SEQ ID NO: 277517 - DNA, 25 bp, probe
tcctgtccagagatgctcataggtc

SEQ ID NO: 277518 - DNA, 25 bp, probe
tccgatcccatgagctcaatgcatt

SEQ ID NO: 277519 - DNA, 25 bp, probe
tcgccacagcgccaggtgaagattc

SEQ ID NO: 277520 - DNA, 25 bp, probe
tccgcaggcgcacggacaaggacac

SEQ ID NO: 277521 - DNA, 25 bp, probe
tccgaggtgcagctgcaacagtact

SEQ ID NO: 277522 - DNA, 25 bp, probe
tcccaggcacagctgaacatgccgc

SEQ ID NO: 277523 - DNA, 25 bp, probe
tccgaggccaataaagtgctcacga

SEQ ID NO: 277524 - DNA, 25 bp, probe
tcctggaggcatcaaaggctgcatc

SEQ ID NO: 277525 - DNA, 25 bp, probe
tcctggagagctcctactttgattc

SEQ ID NO: 277526 - DNA, 25 bp, probe
tccgggagacaggacgggctctcca

SEQ ID NO: 277527 - DNA, 25 bp, probe
tcctgtggagaaggccgggtatgtt

SEQ ID NO: 277528 - DNA, 25 bp, probe
tccgggaaactgtggcgtgatggcc

SEQ ID NO: 277529 - DNA, 25 bp, probe
tcctgggagccactgggagggggac

SEQ ID NO: 277530 - DNA, 25 bp, probe
tcctgggagccactgggagggggac

SEQ ID NO: 277531 - DNA, 25 bp, probe
tccggggctatggtggggaggagaa

SEQ ID NO: 277532 - DNA, 25 bp, probe
tccggggatgacagcggcgggggat

SEQ ID NO: 277533 - DNA, 25 bp, probe
tccgggggacttggggctgagagag

SEQ ID NO: 277534 - DNA, 25 bp, probe
tcacggttggacttggtgtcagtgg

SEQ ID NO: 277535 - DNA, 25 bp, probe
tcctgggtgtgatttccttcactgg

SEQ ID NO: 277536 - DNA, 25 bp, probe
tccctggtggattatccccatcagg

SEQ ID NO: 277537 - DNA, 25 bp, probe
tcctggagggattatttcattatgt

SEQ ID NO: 277538 - DNA, 25 bp, probe
tcctggggagattacccttgtgccc

SEQ ID NO: 277539 - DNA, 25 bp, probe
tccgaaggagaatccagccaagcac

SEQ ID NO: 277540 - DNA, 25 bp, probe
tcccaccaagaatccatcttagcgc

SEQ ID NO: 277541 - DNA, 25 bp, probe
tccgcctaaaattgaagctcttcca

SEQ ID NO: 277542 - DNA, 25 bp, probe
tccggcgcagtaattacagtcttct

SEQ ID NO: 277543 - DNA, 25 bp, probe
tcctggcaactacttcaaggtttcg

SEQ ID NO: 277544 - DNA, 25 bp, probe
tcgctgcagcaagagaacaaggtgc

SEQ ID NO: 277545 - DNA, 25 bp, probe
tcgctgcagcaagagaacaaggtgc

SEQ ID NO: 277546 - DNA, 25 bp, probe
tcctggaacatatacagagttgaga

SEQ ID NO: 277547 - DNA, 25 bp, probe
tccggaccatcctactggtgtgtgg

SEQ ID NO: 277548 - DNA, 25 bp, probe
tccggaccatcctactggtgtgtgg

SEQ ID NO: 277549 - DNA, 25 bp, probe
tccgacccaacagcggcttttggga

SEQ ID NO: 277550 - DNA, 25 bp, probe
tcccccaaagccatgagtttcttgg

SEQ ID NO: 277551 - DNA, 25 bp, probe
tcccgacaacagctactggttcttg

SEQ ID NO: 277552 - DNA, 25 bp, probe
tctcctggaatgcttaatggacctt

SEQ ID NO: 277553 - DNA, 25 bp, probe
tcctgggagatgcgtacgcagcccg

SEQ ID NO: 277554 - DNA, 25 bp, probe
tcctgggagatgcgtacgcagcccg

SEQ ID NO: 277555 - DNA, 25 bp, probe
tcctgggagatgcgtacgcagcccg

SEQ ID NO: 277556 - DNA, 25 bp, probe
tcctgggagatgcgtacgcagcccg

SEQ ID NO: 277557 - DNA, 25 bp, probe
tcctgggagatgcgtacgcagcccg

SEQ ID NO: 277558 - DNA, 25 bp, probe
tcctgggacgctgtacgcaattcag

SEQ ID NO: 277559 - DNA, 25 bp, probe
tcctggtgactgatggacgagtgtc

SEQ ID NO: 277560 - DNA, 25 bp, probe
tcctggtctcagaggacctggtaac

SEQ ID NO: 277561 - DNA, 25 bp, probe
tcctggtcttattggtcctggtgat

SEQ ID NO: 277562 - DNA, 25 bp, probe
tcctggtttctaccttctgtgacaa

SEQ ID NO: 277563 - DNA, 25 bp, probe
tcctggtttctaccttctgtgacaa

SEQ ID NO: 277564 - DNA, 25 bp, probe
tccgaatgtttggccttctgagaaa

SEQ ID NO: 277565 - DNA, 25 bp, probe
tccggatctttcggactctggggac

SEQ ID NO: 277566 - DNA, 25 bp, probe
tccggggcatttgggcactgtagga

SEQ ID NO: 277567 - DNA, 25 bp, probe
tccggaggcttgtgctcaatgcata

SEQ ID NO: 277568 - DNA, 25 bp, probe
tccgaaactctgtgtcttcatgact

SEQ ID NO: 277569 - DNA, 25 bp, probe
tccgttcatacgagtgctttcagca

SEQ ID NO: 277570 - DNA, 25 bp, probe
tccgtgctcttcgagagggtgtcag

SEQ ID NO: 277571 - DNA, 25 bp, probe
tcctggccgtgtgggtggatgtcga

SEQ ID NO: 277572 - DNA, 25 bp, probe
tcctggccgtgtgggtggatgtcga

SEQ ID NO: 277573 - DNA, 25 bp, probe
tcctggccaagcaggctggtttgca

SEQ ID NO: 277574 - DNA, 25 bp, probe
tcctgggtgcagagcgtggttgtat

SEQ ID NO: 277575 - DNA, 25 bp, probe
tcctggctgccgagagtgaagtttc

SEQ ID NO: 277576 - DNA, 25 bp, probe
tccctcccgtgaatgtgaagttccc

SEQ ID NO: 277577 - DNA, 25 bp, probe
tcgtccacaggggatgggatttctg

SEQ ID NO: 277578 - DNA, 25 bp, probe
tcgtccacaggggatgggatttctg

SEQ ID NO: 277579 - DNA, 25 bp, probe
tccccaatggagaatgggacctagt

SEQ ID NO: 277580 - DNA, 25 bp, probe
tccccaaggactagtggagtcctga

SEQ ID NO: 277581 - DNA, 25 bp, probe
tcccctactgaggaggggaccttcg

SEQ ID NO: 277582 - DNA, 25 bp, probe
tcccctatcggggcattgatggcct

SEQ ID NO: 277583 - DNA, 25 bp, probe
tccccagacggaagctcatgtaggt

SEQ ID NO: 277584 - DNA, 25 bp, probe
tccccagacggaagctcatgtaggt

SEQ ID NO: 277585 - DNA, 25 bp, probe
tccccaagaggatggccatgggtgt

SEQ ID NO: 277586 - DNA, 25 bp, probe
tccctcacaggtttctccagaaagt

SEQ ID NO: 277587 - DNA, 25 bp, probe
tcgtgtcagatgtggatatccagag

SEQ ID NO: 277588 - DNA, 25 bp, probe
tcgcttatattgggatgacctgaag

SEQ ID NO: 277589 - DNA, 25 bp, probe
tcgccattaccgagcaccagaagtc

SEQ ID NO: 277590 - DNA, 25 bp, probe
tcccctacctatttctcaaaatcat

SEQ ID NO: 277591 - DNA, 25 bp, probe
tccccagcatccataccagaaaaag

SEQ ID NO: 277592 - DNA, 25 bp, probe
tccccagcatccataccagaaaaag

SEQ ID NO: 277593 - DNA, 25 bp, probe
tcgccgcatacagctaacaaaacgg

SEQ ID NO: 277594 - DNA, 25 bp, probe
tccccatcacctgaaagaaactctt

SEQ ID NO: 277595 - DNA, 25 bp, probe
tccctgccacaaggaaaggaaagca

SEQ ID NO: 277596 - DNA, 25 bp, probe
tccctccgccacctaggaaaggagg

SEQ ID NO: 277597 - DNA, 25 bp, probe
tccctcgctcctgttgttaagaagc

SEQ ID NO: 277598 - DNA, 25 bp, probe
tccccctactggtggatcatcaaag

SEQ ID NO: 277599 - DNA, 25 bp, probe
tcccccaaatgagcaggtccaagac

SEQ ID NO: 277600 - DNA, 25 bp, probe
tccccatggaaggccagggccgggc

SEQ ID NO: 277601 - DNA, 25 bp, probe
tccccaggagatgtggaactcgggc

SEQ ID NO: 277602 - DNA, 25 bp, probe
tccccagggattggaaacggatgac

SEQ ID NO: 277603 - DNA, 25 bp, probe
tccccactgtttgcaatggccgtga

SEQ ID NO: 277604 - DNA, 25 bp, probe
tccccgtggtactgagctcacgtgg

SEQ ID NO: 277605 - DNA, 25 bp, probe
ttccctttactgtggcattggatgg

SEQ ID NO: 277606 - DNA, 25 bp, probe
tccgcctttacgaagtggtggagac

SEQ ID NO: 277607 - DNA, 25 bp, probe
tcccgtgtctacagagggataagac

SEQ ID NO: 277608 - DNA, 25 bp, probe
tcccgtttttgctgaggatacacca

SEQ ID NO: 277609 - DNA, 25 bp, probe
tcccgttgtccctggcacagatgcc

SEQ ID NO: 277610 - DNA, 25 bp, probe
tcccgttggcccagtgcatcaacgg

SEQ ID NO: 277611 - DNA, 25 bp, probe
tccgagctctggagcgtggataccg

SEQ ID NO: 277612 - DNA, 25 bp, probe
tcccagtcgggagtgtggtcagtct

SEQ ID NO: 277613 - DNA, 25 bp, probe
tccgcagacctgcagtggattcagg

SEQ ID NO: 277614 - DNA, 25 bp, probe
tccctgaagtgctttacagtgcatg

SEQ ID NO: 277615 - DNA, 25 bp, probe
tcccaacggctgtgatcgtgttctc

SEQ ID NO: 277616 - DNA, 25 bp, probe
tcccaacggctgtgatcgtgttctc

SEQ ID NO: 277617 - DNA, 25 bp, probe
tcccaactgtacagatttgtttgtt

SEQ ID NO: 277618 - DNA, 25 bp, probe
tcccaactttagccattttgccttg

SEQ ID NO: 277619 - DNA, 25 bp, probe
tccccactttgacatagctgtcatc

SEQ ID NO: 277620 - DNA, 25 bp, probe
tccccagttacactgcagtatgtcc

SEQ ID NO: 277621 - DNA, 25 bp, probe
tccctgcaaggatctgcagttactt

SEQ ID NO: 277622 - DNA, 25 bp, probe
tccgccaagtcagctggatggactc

SEQ ID NO: 277623 - DNA, 25 bp, probe
tccggaacgagacggtggacgtgga

SEQ ID NO: 277624 - DNA, 25 bp, probe
tccggactcggatgactggaggtcg

SEQ ID NO: 277625 - DNA, 25 bp, probe
tccggactcggatgactggaggtcg

SEQ ID NO: 277626 - DNA, 25 bp, probe
tccggactcggatgactggaggtcg

SEQ ID NO: 277627 - DNA, 25 bp, probe
tccggagccaggagagtgaggggcc

SEQ ID NO: 277628 - DNA, 25 bp, probe
tcctggcagccggcatgaagtgggg

SEQ ID NO: 277629 - DNA, 25 bp, probe
tcctggcatagcagatgacttccgt

SEQ ID NO: 277630 - DNA, 25 bp, probe
tcctggcatagcacagggtcatggt

SEQ ID NO: 277631 - DNA, 25 bp, probe
tccgaatcatgcccggggcaggtaa

SEQ ID NO: 277632 - DNA, 25 bp, probe
tccgcctcgagcggggagggtaatg

SEQ ID NO: 277633 - DNA, 25 bp, probe
tccgactgccgctgagaagggttga

SEQ ID NO: 277634 - DNA, 25 bp, probe
tccggctgcggacaaagagggtgac

SEQ ID NO: 277635 - DNA, 25 bp, probe
tcctggcagggcccaaaggcaggcg

SEQ ID NO: 277636 - DNA, 25 bp, probe
tcctggcagtggccaacatcagagg

SEQ ID NO: 277637 - DNA, 25 bp, probe
tcctggcagtgcgtcaatcagagcg

SEQ ID NO: 277638 - DNA, 25 bp, probe
tcccgatgacctgatcggctgttcc

SEQ ID NO: 277639 - DNA, 25 bp, probe
tccccaaagctgtggtggtgctcac

SEQ ID NO: 277640 - DNA, 25 bp, probe
tccccaagattgagcggagtgcctc

SEQ ID NO: 277641 - DNA, 25 bp, probe
tccccaagattgcgctgcagggctc

SEQ ID NO: 277642 - DNA, 25 bp, probe
tccccagagcttggagtctgggccc

SEQ ID NO: 277643 - DNA, 25 bp, probe
tctccaagcagcttagagttggcca

SEQ ID NO: 277644 - DNA, 25 bp, probe
tcccgacgcacatgggtagcgaccg

SEQ ID NO: 277645 - DNA, 25 bp, probe
tcccgacgcacatgggtagcgaccg

SEQ ID NO: 277646 - DNA, 25 bp, probe
tcccgaccctcactggaagagatcc

SEQ ID NO: 277647 - DNA, 25 bp, probe
tcccgaccctcactggaagagatcc

SEQ ID NO: 277648 - DNA, 25 bp, probe
tcccgccaagcctggacaggatctt

SEQ ID NO: 277649 - DNA, 25 bp, probe
tccccctacccttcaagagatgatt

SEQ ID NO: 277650 - DNA, 25 bp, probe
tcccccttctccatataagcaaagc

SEQ ID NO: 277651 - DNA, 25 bp, probe
tcccccttctagagtgcttcaaaat

SEQ ID NO: 277652 - DNA, 25 bp, probe
tccccagtttagagggccacaagct

SEQ ID NO: 277653 - DNA, 25 bp, probe
tctccccgtgtaggggagccccagc

SEQ ID NO: 277654 - DNA, 25 bp, probe
tccctcacggggagagagaccacac

SEQ ID NO: 277655 - DNA, 25 bp, probe
tccctcacggggagagagaccacac

SEQ ID NO: 277656 - DNA, 25 bp, probe
tcccgtcgtagtaagaagaccacac

SEQ ID NO: 277657 - DNA, 25 bp, probe
tccgcgtccgaggtgtgaagaccaa

SEQ ID NO: 277658 - DNA, 25 bp, probe
tccgcaaactggggctaaatccgca

SEQ ID NO: 277659 - DNA, 25 bp, probe
tctccaaactggtctcaaactcctg

SEQ ID NO: 277660 - DNA, 25 bp, probe
tcccattcatcgctctcaaaattag

SEQ ID NO: 277661 - DNA, 25 bp, probe
tcccatctccaactcggaagtaagc

SEQ ID NO: 277662 - DNA, 25 bp, probe
tcccatctccaactcggaagtaagc

SEQ ID NO: 277663 - DNA, 25 bp, probe
tccccaccaataaaacagatcaatg

SEQ ID NO: 277664 - DNA, 25 bp, probe
tccctctcacagaaaagtcttacga

SEQ ID NO: 277665 - DNA, 25 bp, probe
tccctcatcaatccaataatctaca

SEQ ID NO: 277666 - DNA, 25 bp, probe
tccccatactccaatatgcttggca

SEQ ID NO: 277667 - DNA, 25 bp, probe
tcccccgctccagttattggaatgg

SEQ ID NO: 277668 - DNA, 25 bp, probe
tcacccaccccagttgtaggtagaa

SEQ ID NO: 277669 - DNA, 25 bp, probe
tccccttcccatgtatcagtgaaaa

SEQ ID NO: 277670 - DNA, 25 bp, probe
tccgccagtgccaacttagagttaa

SEQ ID NO: 277671 - DNA, 25 bp, probe
tccgccagtgccaacttagagttaa

SEQ ID NO: 277672 - DNA, 25 bp, probe
tccccattcaaggcagtcaagttaa

SEQ ID NO: 277673 - DNA, 25 bp, probe
tccccattgaagatgtcctgtccac

SEQ ID NO: 277674 - DNA, 25 bp, probe
tcccgctaggagagtcctcttctaa

SEQ ID NO: 277675 - DNA, 25 bp, probe
tccctgtatggaggtctcccgattc

SEQ ID NO: 277676 - DNA, 25 bp, probe
tccctgaaggatggtcttctcatct

SEQ ID NO: 277677 - DNA, 25 bp, probe
tccctgttgtgaggttccttccagg

SEQ ID NO: 277678 - DNA, 25 bp, probe
tcccttattgagggcccagacaggg

SEQ ID NO: 277679 - DNA, 25 bp, probe
tccctgtacggtggatggcaccgga

SEQ ID NO: 277680 - DNA, 25 bp, probe
tcccaggatccatggcaggacggtg

SEQ ID NO: 277681 - DNA, 25 bp, probe
tcccggacctaccaggtggtgttgg

SEQ ID NO: 277682 - DNA, 25 bp, probe
tccgcaggacgctcaaggaggtgct

SEQ ID NO: 277683 - DNA, 25 bp, probe
tccgcacacacctgaaacatgttct

SEQ ID NO: 277684 - DNA, 25 bp, probe
tcccaccaccaccatgaagtttggt

SEQ ID NO: 277685 - DNA, 25 bp, probe
tccgcaaacctcctgaagtgggcag

SEQ ID NO: 277686 - DNA, 25 bp, probe
tccgcagaagctgcctgcatcggag

SEQ ID NO: 277687 - DNA, 25 bp, probe
tcccgcagcagttcctgaatggggt

SEQ ID NO: 277688 - DNA, 25 bp, probe
tccgcgtcatgttcaaggagccggt

SEQ ID NO: 277689 - DNA, 25 bp, probe
tccctggagtacgggcagcacaggt

SEQ ID NO: 277690 - DNA, 25 bp, probe
tcccgagtgcttgaggatgatccgg

SEQ ID NO: 277691 - DNA, 25 bp, probe
tccccagctgtatgaggagagcttc

SEQ ID NO: 277692 - DNA, 25 bp, probe
tcccccagctcaaggagagccttct

SEQ ID NO: 277693 - DNA, 25 bp, probe
tcccctacctgaaagaactcctgaa

SEQ ID NO: 277694 - DNA, 25 bp, probe
tccccctttacctaatctagtagat

SEQ ID NO: 277695 - DNA, 25 bp, probe
tccccctttacctaatctagtagat

SEQ ID NO: 277696 - DNA, 25 bp, probe
tcccacctgtcaacctgaattaaag

SEQ ID NO: 277697 - DNA, 25 bp, probe
tccgtggtgtatactctgtgattga

SEQ ID NO: 277698 - DNA, 25 bp, probe
tccgtgtggttgacccagatatctc

SEQ ID NO: 277699 - DNA, 25 bp, probe
tccgtacgattgtctctgaaacatc

SEQ ID NO: 277700 - DNA, 25 bp, probe
tccctcccattgtcattgaaaaagt

SEQ ID NO: 277701 - DNA, 25 bp, probe
tccgctcctgataatgatgttgaaa

SEQ ID NO: 277702 - DNA, 25 bp, probe
tccgatgtgctacatgagatggaaa

SEQ ID NO: 277703 - DNA, 25 bp, probe
tccgatcctgagttgcagaggaaga

SEQ ID NO: 277704 - DNA, 25 bp, probe
tccggctgcaggtggagcggcagga

SEQ ID NO: 277705 - DNA, 25 bp, probe
tccggctgcaggtggagcggcagga

SEQ ID NO: 277706 - DNA, 25 bp, probe
tccggccagccatcatgagggagga

SEQ ID NO: 277707 - DNA, 25 bp, probe
tccggccagcagtactgactcagga

SEQ ID NO: 277708 - DNA, 25 bp, probe
tccgcacggagaacgagctgcatgg

SEQ ID NO: 277709 - DNA, 25 bp, probe
tccgcagccgaaagcagggcatcat

SEQ ID NO: 277710 - DNA, 25 bp, probe
tcgcgatgcactactcggtgtgaat

SEQ ID NO: 277711 - DNA, 25 bp, probe
tccgtgacgacatgctgtgtgccgg

SEQ ID NO: 277712 - DNA, 25 bp, probe
tcccacgggtgatgcttccaggggt

SEQ ID NO: 277713 - DNA, 25 bp, probe
tcccaggacgtttgcttacactggc

SEQ ID NO: 277714 - DNA, 25 bp, probe
tcccgggagttcttcaaccggagag

SEQ ID NO: 277715 - DNA, 25 bp, probe
tcccggtgacattctatttccagga

SEQ ID NO: 277716 - DNA, 25 bp, probe
tcccggtgacattctatttccagga

SEQ ID NO: 277717 - DNA, 25 bp, probe
tccgtggccatcaatgcctttggca

SEQ ID NO: 277718 - DNA, 25 bp, probe
tccgatggcaacagtccttggtcaa

SEQ ID NO: 277719 - DNA, 25 bp, probe
tccgatggcaacagtccttggtcaa

SEQ ID NO: 277720 - DNA, 25 bp, probe
tccgggacttcgactttgtgtcaga

SEQ ID NO: 277721 - DNA, 25 bp, probe
tcccggacaagcccatttggaagaa

SEQ ID NO: 277722 - DNA, 25 bp, probe
tcgactggccaaggtttggggaaga

SEQ ID NO: 277723 - DNA, 25 bp, probe
tccctgagccctgatttgtggtagg

SEQ ID NO: 277724 - DNA, 25 bp, probe
tcccgacaccagaagctgttgggag

SEQ ID NO: 277725 - DNA, 25 bp, probe
tccccaattgcggagcgtctgggat

SEQ ID NO: 277726 - DNA, 25 bp, probe
tccccgattccaatgctgttttttg

SEQ ID NO: 277727 - DNA, 25 bp, probe
tccccgattccaatgctgttttttg

SEQ ID NO: 277728 - DNA, 25 bp, probe
tccctaggtgttaatgtctttcttc

SEQ ID NO: 277729 - DNA, 25 bp, probe
tccctcaaaaattagtccttgcttc

SEQ ID NO: 277730 - DNA, 25 bp, probe
tccctcaaaaattagtccttgcttc

SEQ ID NO: 277731 - DNA, 25 bp, probe
tcccaaagtatatagttccatccca

SEQ ID NO: 277732 - DNA, 25 bp, probe
tccgacagggataacagcttcctcc

SEQ ID NO: 277733 - DNA, 25 bp, probe
tccgacggaataatagcagcccctt

SEQ ID NO: 277734 - DNA, 25 bp, probe
tccgacggaataatagcagcccctt

SEQ ID NO: 277735 - DNA, 25 bp, probe
tccgagggagacattcggcacctcc

SEQ ID NO: 277736 - DNA, 25 bp, probe
tccggggatgacatctctgtcttcg

SEQ ID NO: 277737 - DNA, 25 bp, probe
tccgaggggagcccaatgtctccta

SEQ ID NO: 277738 - DNA, 25 bp, probe
tccgaggggcacatcaaaatcgctg

SEQ ID NO: 277739 - DNA, 25 bp, probe
tccggggagacagcaacaccagatg

SEQ ID NO: 277740 - DNA, 25 bp, probe
tccggggagacagatctctcaaagg

SEQ ID NO: 277741 - DNA, 25 bp, probe
tccgacgggaacatctccaacagaa

SEQ ID NO: 277742 - DNA, 25 bp, probe
tccgaaggaacaattcttccctcat

SEQ ID NO: 277743 - DNA, 25 bp, probe
tccgacatgaagccagtgacttccc

SEQ ID NO: 277744 - DNA, 25 bp, probe
tccctgatgattcgagtgactttct

SEQ ID NO: 277745 - DNA, 25 bp, probe
tcccagattctctggcctttttaat

SEQ ID NO: 277746 - DNA, 25 bp, probe
tcccttggcaattgggtcttttaat

SEQ ID NO: 277747 - DNA, 25 bp, probe
tctacctggcaaaacgtcctttgca

SEQ ID NO: 277748 - DNA, 25 bp, probe
tctgattcagtatggaccccttcca

SEQ ID NO: 277749 - DNA, 25 bp, probe
tctgattcagtatggaccccttcca

SEQ ID NO: 277750 - DNA, 25 bp, probe
tctcaaagtatctaattcaccttaa

SEQ ID NO: 277751 - DNA, 25 bp, probe
tcccagactgtcttttatctttaga

SEQ ID NO: 277752 - DNA, 25 bp, probe
tcccagactgtcttttatctttaga

SEQ ID NO: 277753 - DNA, 25 bp, probe
tcccaccttgcatttcagacctggg

SEQ ID NO: 277754 - DNA, 25 bp, probe
tcccacagcttgcaaggaccaaggg

SEQ ID NO: 277755 - DNA, 25 bp, probe
tccgcaaggttcatgtgaccaagga

SEQ ID NO: 277756 - DNA, 25 bp, probe
tcgcgccggattattgctgcaactg

SEQ ID NO: 277757 - DNA, 25 bp, probe
tcccctgtgtagattggcacttctc

SEQ ID NO: 277758 - DNA, 25 bp, probe
tccgaatgttagattcctcttgcct

SEQ ID NO: 277759 - DNA, 25 bp, probe
tccgcaagttgtcctatttttgtca

SEQ ID NO: 277760 - DNA, 25 bp, probe
tccgcttttgttgcatcactatgtg

SEQ ID NO: 277761 - DNA, 25 bp, probe
tccgctttcttttatagctgcttca

SEQ ID NO: 277762 - DNA, 25 bp, probe
tcccttatccttagctatgccaaca

SEQ ID NO: 277763 - DNA, 25 bp, probe
tccctcaatttttctttcaacagtg

SEQ ID NO: 277764 - DNA, 25 bp, probe
tccctcaatttttctttcaacagtg

SEQ ID NO: 277765 - DNA, 25 bp, probe
tccccaagtgaatctcctaacagac

SEQ ID NO: 277766 - DNA, 25 bp, probe
tcccctcaggaatttgtctaacaca

SEQ ID NO: 277767 - DNA, 25 bp, probe
tctccccaggaattcacttaaaaag

SEQ ID NO: 277768 - DNA, 25 bp, probe
tcccccaggaggtctctttgaagat

SEQ ID NO: 277769 - DNA, 25 bp, probe
tccgcccctgggtctggggaagaag

SEQ ID NO: 277770 - DNA, 25 bp, probe
tccgcccctgggtctggggaagaag

SEQ ID NO: 277771 - DNA, 25 bp, probe
tcccctcgcatggaactcgggtgaa

SEQ ID NO: 277772 - DNA, 25 bp, probe
tcccctccatgctataatccagtgg

SEQ ID NO: 277773 - DNA, 25 bp, probe
tcccctagctgtaaaacagggacgg

SEQ ID NO: 277774 - DNA, 25 bp, probe
tcccgtggcattaaaagagagtcaa

SEQ ID NO: 277775 - DNA, 25 bp, probe
tcccctggcttgcagaaaatccaga

SEQ ID NO: 277776 - DNA, 25 bp, probe
tcacctacctggagaaataccggcc

SEQ ID NO: 277777 - DNA, 25 bp, probe
tccctaccgctgaggagatgtccag

SEQ ID NO: 277778 - DNA, 25 bp, probe
tccctaccgctgaggagatgtccag

SEQ ID NO: 277779 - DNA, 25 bp, probe
tccctaccgctgaggagatgtccag

SEQ ID NO: 277780 - DNA, 25 bp, probe
tccgcgacgaggaggagttgcgcgc

SEQ ID NO: 277781 - DNA, 25 bp, probe
tccgcgggaggatggagcagtgagc

SEQ ID NO: 277782 - DNA, 25 bp, probe
tccgcgtgaagaacaagaccgacta

SEQ ID NO: 277783 - DNA, 25 bp, probe
tcccgtggaattccatgatcctgat

SEQ ID NO: 277784 - DNA, 25 bp, probe
tctccaaggactctcatgcacttat

SEQ ID NO: 277785 - DNA, 25 bp, probe
tcccagcggactccgagcacaataa

SEQ ID NO: 277786 - DNA, 25 bp, probe
tcccgggacaacagcagggacagct

SEQ ID NO: 277787 - DNA, 25 bp, probe
tcccgggaaagaacaggtcgtgtct

SEQ ID NO: 277788 - DNA, 25 bp, probe
tccctgggttcatccaggttgttcc

SEQ ID NO: 277789 - DNA, 25 bp, probe
tccccgtttaacgtggtgctgttgg

SEQ ID NO: 277790 - DNA, 25 bp, probe
tcccctttgtttgtgattgctgcta

SEQ ID NO: 277791 - DNA, 25 bp, probe
tccccttttgccagagatctgcatt

SEQ ID NO: 277792 - DNA, 25 bp, probe
tccctgatttattctggtgtctaat

SEQ ID NO: 277793 - DNA, 25 bp, probe
tcgttatttattggaggtattgttt

SEQ ID NO: 277794 - DNA, 25 bp, probe
tcccctataattgtgctgtttttat

SEQ ID NO: 277795 - DNA, 25 bp, probe
tccctttactatgattaatttttgt

SEQ ID NO: 277796 - DNA, 25 bp, probe
tccctgcttggttcttgaagttttt

SEQ ID NO: 277797 - DNA, 25 bp, probe
tcccatttcgtgtgggcgcttcatt

SEQ ID NO: 277798 - DNA, 25 bp, probe
tccccttcattgggggcatgctaca

SEQ ID NO: 277799 - DNA, 25 bp, probe
tccccttcattgggggcatgctaca

SEQ ID NO: 277800 - DNA, 25 bp, probe
tcccacttttgatggatatgtatcc

SEQ ID NO: 277801 - DNA, 25 bp, probe
tccccttatgtatgctgctagtgtt

SEQ ID NO: 277802 - DNA, 25 bp, probe
tccccttatgtatgctgctagtgtt

SEQ ID NO: 277803 - DNA, 25 bp, probe
tcccatattattcagctcgagtact

SEQ ID NO: 277804 - DNA, 25 bp, probe
tcccatattattcagctcgagtact

SEQ ID NO: 277805 - DNA, 25 bp, probe
tcccagatccgtccatttagtacta

SEQ ID NO: 277806 - DNA, 25 bp, probe
tcccgtggctgtcatcagtggtgag

SEQ ID NO: 277807 - DNA, 25 bp, probe
tcccatctggctcagcatagggtca

SEQ ID NO: 277808 - DNA, 25 bp, probe
tcccctgggaacatgaagatcaaga

SEQ ID NO: 277809 - DNA, 25 bp, probe
tcccctgggaacttgtagtaggcca

SEQ ID NO: 277810 - DNA, 25 bp, probe
tcccacggagaccgtgggcttggcc

SEQ ID NO: 277811 - DNA, 25 bp, probe
tcccaggaaattgtgcggctcagca

SEQ ID NO: 277812 - DNA, 25 bp, probe
tcggcggacttgtgatcggcctgca

SEQ ID NO: 277813 - DNA, 25 bp, probe
tactgaggaccctgggacttaagaa

SEQ ID NO: 277814 - DNA, 25 bp, probe
tcccaggacttaaggccctataagg

SEQ ID NO: 277815 - DNA, 25 bp, probe
tcccaggagccaatcagaggcccat

SEQ ID NO: 277816 - DNA, 25 bp, probe
tccctggaccagactgctggagcca

SEQ ID NO: 277817 - DNA, 25 bp, probe
tcccagtgcactaccttggatgtgg

SEQ ID NO: 277818 - DNA, 25 bp, probe
tccgaccagctcagactggcagtcg

SEQ ID NO: 277819 - DNA, 25 bp, probe
tccgctccatccagactgacaagcg

SEQ ID NO: 277820 - DNA, 25 bp, probe
tccctacatctcacactaacaggca

SEQ ID NO: 277821 - DNA, 25 bp, probe
tccctacatctcacactaacaggca

SEQ ID NO: 277822 - DNA, 25 bp, probe
tcccaccatactgctcataataaca

SEQ ID NO: 277823 - DNA, 25 bp, probe
tcccttccacatggattgaaaacaa

SEQ ID NO: 277824 - DNA, 25 bp, probe
tcccaatccctatttgagaaacact

SEQ ID NO: 277825 - DNA, 25 bp, probe
tcccctgcaccgagggaacaactcg

SEQ ID NO: 277826 - DNA, 25 bp, probe
tcccctgcaccgagggaacaactcg

SEQ ID NO: 277827 - DNA, 25 bp, probe
tctaactgcctcgtagggtagaaac

SEQ ID NO: 277828 - DNA, 25 bp, probe
tctaactgcctcgtagggtagaaac

SEQ ID NO: 277829 - DNA, 25 bp, probe
tccgaagcctcctaagacgagaacc

SEQ ID NO: 277830 - DNA, 25 bp, probe
tcgaaaccgatccaacctagagacc

SEQ ID NO: 277831 - DNA, 25 bp, probe
tcgaacctaatccagaccaacgatt

SEQ ID NO: 277832 - DNA, 25 bp, probe
tcgacagctctacagaaacaaagat

SEQ ID NO: 277833 - DNA, 25 bp, probe
tcgacagctctacagaaacaaagat

SEQ ID NO: 277834 - DNA, 25 bp, probe
tcgcaactcagtcaacaggaaggca

SEQ ID NO: 277835 - DNA, 25 bp, probe
tcgcaactcagtcaacaggaaggca

SEQ ID NO: 277836 - DNA, 25 bp, probe
tcccctggtggatctgaggcaggca

SEQ ID NO: 277837 - DNA, 25 bp, probe
tccccgctgtgtgactttgggcaag

SEQ ID NO: 277838 - DNA, 25 bp, probe
tcccaggctatgtatcctttcggca

SEQ ID NO: 277839 - DNA, 25 bp, probe
tccctggtttctattgatctggaag

SEQ ID NO: 277840 - DNA, 25 bp, probe
tccctgttttcttctgtaattatac

SEQ ID NO: 277841 - DNA, 25 bp, probe
tccctgagttttgcttattcactga

SEQ ID NO: 277842 - DNA, 25 bp, probe
tcccgatgttagaaatggttccaga

SEQ ID NO: 277843 - DNA, 25 bp, probe
tccccgtctgagaaatgagagtcga

SEQ ID NO: 277844 - DNA, 25 bp, probe
tccctcctctgtagcttgatatgtt

SEQ ID NO: 277845 - DNA, 25 bp, probe
tccgctctacatttgtgtttgtgtt

SEQ ID NO: 277846 - DNA, 25 bp, probe
tcccttcatgcttgtggctttgttg

SEQ ID NO: 277847 - DNA, 25 bp, probe
tccgcttattccttggtatggtgac

SEQ ID NO: 277848 - DNA, 25 bp, probe
tcccggctactcgggtaggctgagg

SEQ ID NO: 277849 - DNA, 25 bp, probe
tcccttctactcggggcaagtggaa

SEQ ID NO: 277850 - DNA, 25 bp, probe
tcccttctactcggggcaagtggaa

SEQ ID NO: 277851 - DNA, 25 bp, probe
tccccatcttctgggtcagcaagtg

SEQ ID NO: 277852 - DNA, 25 bp, probe
tccctcatctacatggacagccgtg

SEQ ID NO: 277853 - DNA, 25 bp, probe
tccccatcaacgacaactactgtga

SEQ ID NO: 277854 - DNA, 25 bp, probe
tccccatggactatcactgtctggg

SEQ ID NO: 277855 - DNA, 25 bp, probe
tccgctacagacaacccatgtcata

SEQ ID NO: 277856 - DNA, 25 bp, probe
tccgctatgaactccttgaagaaaa

SEQ ID NO: 277857 - DNA, 25 bp, probe
tccgcaaggacatctttggagacat

SEQ ID NO: 277858 - DNA, 25 bp, probe
tccgcaaggacttccatggcgagct

SEQ ID NO: 277859 - DNA, 25 bp, probe
tccgcaaggcgctcaagagcctgct

SEQ ID NO: 277860 - DNA, 25 bp, probe
tcccacagggaacaggctgctccca

SEQ ID NO: 277861 - DNA, 25 bp, probe
tcccaacctgaatgacctggcatcc

SEQ ID NO: 277862 - DNA, 25 bp, probe
tccccactatgatcaacatcggctc

SEQ ID NO: 277863 - DNA, 25 bp, probe
tccccactatgatcaacatcggctc

SEQ ID NO: 277864 - DNA, 25 bp, probe
tcccccggatgccataactggctgg

SEQ ID NO: 277865 - DNA, 25 bp, probe
tccgcccagaagccatagacgagac

SEQ ID NO: 277866 - DNA, 25 bp, probe
tccgcttcaaggcagagcaaatgtg

SEQ ID NO: 277867 - DNA, 25 bp, probe
tccgcagcacacactgggaatacta

SEQ ID NO: 277868 - DNA, 25 bp, probe
tcccgacagctcctgggaatatcct

SEQ ID NO: 277869 - DNA, 25 bp, probe
tcccgaagtgctggacgaaagcctg

SEQ ID NO: 277870 - DNA, 25 bp, probe
tccctgtagtgccaactgaagtgcc

SEQ ID NO: 277871 - DNA, 25 bp, probe
tccctggagctaccacgtatctagc

SEQ ID NO: 277872 - DNA, 25 bp, probe
tccgctggtgtatcagttagtgcag

SEQ ID NO: 277873 - DNA, 25 bp, probe
tccgctctgatgtctggagtttggg

SEQ ID NO: 277874 - DNA, 25 bp, probe
tccccttatctgtagtcttaggaac

SEQ ID NO: 277875 - DNA, 25 bp, probe
tcccccatgtcatcagtcttaaaaa

SEQ ID NO: 277876 - DNA, 25 bp, probe
tcccaggcttaattgccctacaaag

SEQ ID NO: 277877 - DNA, 25 bp, probe
tcccgttttatttatctacaataga

SEQ ID NO: 277878 - DNA, 25 bp, probe
tccctttttgatcatatctacacca

SEQ ID NO: 277879 - DNA, 25 bp, probe
tccctgtattctattttactacaat

SEQ ID NO: 277880 - DNA, 25 bp, probe
tccctgtattctattttactacaat

SEQ ID NO: 277881 - DNA, 25 bp, probe
tcccttcatttactttttcttgcta

SEQ ID NO: 277882 - DNA, 25 bp, probe
tcccttttgttattataattgtctg

SEQ ID NO: 277883 - DNA, 25 bp, probe
tcccattgactgtttattaagcacc

SEQ ID NO: 277884 - DNA, 25 bp, probe
tcccagcgactgctttcaaatacta

SEQ ID NO: 277885 - DNA, 25 bp, probe
tccccaagtggtttccacatgctct

SEQ ID NO: 277886 - DNA, 25 bp, probe
tccgacaaatgggtctcaagctctc

SEQ ID NO: 277887 - DNA, 25 bp, probe
tctggaccaaaggaacatagcccta

SEQ ID NO: 277888 - DNA, 25 bp, probe
tctatactccaagcgactagaccgg

SEQ ID NO: 277889 - DNA, 25 bp, probe
tttacccaagtccaaagacaatggc

SEQ ID NO: 277890 - DNA, 25 bp, probe
tcgtacctgcaaagtaaaaaatcac

SEQ ID NO: 277891 - DNA, 25 bp, probe
tcgctgacctgcgtagtgagaagca

SEQ ID NO: 277892 - DNA, 25 bp, probe
tcgtcacggtctcgggagacgggct

SEQ ID NO: 277893 - DNA, 25 bp, probe
tccccagagtcaccgggaggagagc

SEQ ID NO: 277894 - DNA, 25 bp, probe
tccccagagtcaaccttgggtgatg

SEQ ID NO: 277895 - DNA, 25 bp, probe
tccccactgccaacgtgtcagtggt

SEQ ID NO: 277896 - DNA, 25 bp, probe
tcccctctgcaaaggtctcttgagg

SEQ ID NO: 277897 - DNA, 25 bp, probe
tcccctctgcaaaggtctcttgagg

SEQ ID NO: 277898 - DNA, 25 bp, probe
tcccctcagcagagtgtgtttaaga

SEQ ID NO: 277899 - DNA, 25 bp, probe
tccctgtgagcatttgtggttatag

SEQ ID NO: 277900 - DNA, 25 bp, probe
tccctgtgagcatttgtggttatag

SEQ ID NO: 277901 - DNA, 25 bp, probe
tcccagtgacaatatggaattctgt

SEQ ID NO: 277902 - DNA, 25 bp, probe
tcgccgggatgacatggaatcgtta

SEQ ID NO: 277903 - DNA, 25 bp, probe
tcccgggaagcgactgtatccttgg

SEQ ID NO: 277904 - DNA, 25 bp, probe
tccctgccgaaaacgagacaattga

SEQ ID NO: 277905 - DNA, 25 bp, probe
tccccgggaattcggaaatcgatca

SEQ ID NO: 277906 - DNA, 25 bp, probe
tcccgcggcgacttggagagaggga

SEQ ID NO: 277907 - DNA, 25 bp, probe
tccccgggactccgaggtggagatg

SEQ ID NO: 277908 - DNA, 25 bp, probe
tccccgggagcccgatgaggggctg

SEQ ID NO: 277909 - DNA, 25 bp, probe
tcccctggggcctacagaggtgggc

SEQ ID NO: 277910 - DNA, 25 bp, probe
tccccttgggcactgaggagagggg

SEQ ID NO: 277911 - DNA, 25 bp, probe
tccccttcccaggaggtgcagtggg

SEQ ID NO: 277912 - DNA, 25 bp, probe
tcccctcttttggggtagatgcggc

SEQ ID NO: 277913 - DNA, 25 bp, probe
tcccgttttgattttgtgagagcgt

SEQ ID NO: 277914 - DNA, 25 bp, probe
tcccctgtggtgttttgtcacaatg

SEQ ID NO: 277915 - DNA, 25 bp, probe
tccccttgtggtgttgccagacggg

SEQ ID NO: 277916 - DNA, 25 bp, probe
tccccctgtagactagtgccgtggg

SEQ ID NO: 277917 - DNA, 25 bp, probe
tcccacctggaactgaattgcttgg

SEQ ID NO: 277918 - DNA, 25 bp, probe
tccccatcgagactgtggtgtgcct

SEQ ID NO: 277919 - DNA, 25 bp, probe
tccgcaccatagctgtggtgctgac

SEQ ID NO: 277920 - DNA, 25 bp, probe
tccctcgtgaggctggatctcaaaa

SEQ ID NO: 277921 - DNA, 25 bp, probe
tcccttgggattggtatctggaaaa

SEQ ID NO: 277922 - DNA, 25 bp, probe
tccctctgggcactggtaatcccaa

SEQ ID NO: 277923 - DNA, 25 bp, probe
tcccttgtacttgtcaagtcgacat

SEQ ID NO: 277924 - DNA, 25 bp, probe
tccctctgtagtttctcaagtgaac

SEQ ID NO: 277925 - DNA, 25 bp, probe
tccctctcccttgagaagctgagtc

SEQ ID NO: 277926 - DNA, 25 bp, probe
tccctctcccttgagaagctgagtc

SEQ ID NO: 277927 - DNA, 25 bp, probe
tccctctccctacgagaagctgaag

SEQ ID NO: 277928 - DNA, 25 bp, probe
tcccgctgacctgcaggaagcatat

SEQ ID NO: 277929 - DNA, 25 bp, probe
tcccgctgacctgcaggaagcatat

SEQ ID NO: 277930 - DNA, 25 bp, probe
tccctgcgacctgaaaggcattggt

SEQ ID NO: 277931 - DNA, 25 bp, probe
tccctgcgacctgaaaggcattggt

SEQ ID NO: 277932 - DNA, 25 bp, probe
tccctggtgcactcaacagttgggt

SEQ ID NO: 277933 - DNA, 25 bp, probe
tccctgagctctcactatcatttga

SEQ ID NO: 277934 - DNA, 25 bp, probe
tccctgagctctcactatcatttga

SEQ ID NO: 277935 - DNA, 25 bp, probe
tccctggttcgagtatgtcttggaa

SEQ ID NO: 277936 - DNA, 25 bp, probe
tccctgggcccaggatgaatgggag

SEQ ID NO: 277937 - DNA, 25 bp, probe
tcccgggcccgttgaggatgaggcc

SEQ ID NO: 277938 - DNA, 25 bp, probe
tccctgtcgcacgtgtaggaggctg

SEQ ID NO: 277939 - DNA, 25 bp, probe
tccccatcagcaccatggaggcagg

SEQ ID NO: 277940 - DNA, 25 bp, probe
tcccgcgcatgctcatgaagctggt

SEQ ID NO: 277941 - DNA, 25 bp, probe
tcgacgcacagctaatatccgcagc

SEQ ID NO: 277942 - DNA, 25 bp, probe
tccctgccatgtatatccgaggctt

SEQ ID NO: 277943 - DNA, 25 bp, probe
tcccagtcattgagtctcgagtcac

SEQ ID NO: 277944 - DNA, 25 bp, probe
tcccaggttgaggtgcgctcacctc

SEQ ID NO: 277945 - DNA, 25 bp, probe
tcccggcaatgatgtcgatgaccag

SEQ ID NO: 277946 - DNA, 25 bp, probe
tcccctgcactgtattggaggcctt

SEQ ID NO: 277947 - DNA, 25 bp, probe
tcccttgcctgtatggagcatctgc

SEQ ID NO: 277948 - DNA, 25 bp, probe
tcccgtgcatgtgtggaatgcttca

SEQ ID NO: 277949 - DNA, 25 bp, probe
tccctggtgtgtaagattgctgact

SEQ ID NO: 277950 - DNA, 25 bp, probe
tccctgctgggtgggaatgcgctct

SEQ ID NO: 277951 - DNA, 25 bp, probe
tcccctggagtgtgaagctgaccag

SEQ ID NO: 277952 - DNA, 25 bp, probe
tcccctggagtgtgaagctgaccag

SEQ ID NO: 277953 - DNA, 25 bp, probe
tcccctggacacagaggtgcccatg

SEQ ID NO: 277954 - DNA, 25 bp, probe
tcccctgcccagatagctggtggtg

SEQ ID NO: 277955 - DNA, 25 bp, probe
tccctgtaccagatcacctggtgga

SEQ ID NO: 277956 - DNA, 25 bp, probe
tccctcatcacaggacccactgagg

SEQ ID NO: 277957 - DNA, 25 bp, probe
tccgctacaagagtatccctgtgga

SEQ ID NO: 277958 - DNA, 25 bp, probe
tccctatctatgctaccacatttgg

SEQ ID NO: 277959 - DNA, 25 bp, probe
tcccttgctttatccagtgatgatg

SEQ ID NO: 277960 - DNA, 25 bp, probe
tcccttgctttatccagtgatgatg

SEQ ID NO: 277961 - DNA, 25 bp, probe
tcccatcttttagcaagcacatatg

SEQ ID NO: 277962 - DNA, 25 bp, probe
tcccatcagtttagcccagagatag

SEQ ID NO: 277963 - DNA, 25 bp, probe
tccctcgagtggagccagacagcag

SEQ ID NO: 277964 - DNA, 25 bp, probe
tccccgcaggacacaagtgccagat

SEQ ID NO: 277965 - DNA, 25 bp, probe
tccctctcaggatccaagctaagca

SEQ ID NO: 277966 - DNA, 25 bp, probe
tcccaagcagtacccaggctttgca

SEQ ID NO: 277967 - DNA, 25 bp, probe
tcatcctagatcaccgaggttatgc

SEQ ID NO: 277968 - DNA, 25 bp, probe
tccccagcactgtccagaggatatt

SEQ ID NO: 277969 - DNA, 25 bp, probe
tcccacctgcaggccaggatgttgt

SEQ ID NO: 277970 - DNA, 25 bp, probe
tcccctgtgcaggctcaagagctgg

SEQ ID NO: 277971 - DNA, 25 bp, probe
tcccagctgtcactcatgcaacagc

SEQ ID NO: 277972 - DNA, 25 bp, probe
tcccagctgtcactcatgcaacagc

SEQ ID NO: 277973 - DNA, 25 bp, probe
tcccatcgtctgcatgataagccac

SEQ ID NO: 277974 - DNA, 25 bp, probe
tcccacgacatgcactcaatagccg

SEQ ID NO: 277975 - DNA, 25 bp, probe
tcccaaggcatccatcagagcagac

SEQ ID NO: 277976 - DNA, 25 bp, probe
tccccagtgactcagagagagcaag

SEQ ID NO: 277977 - DNA, 25 bp, probe
tccccagctggtgtgtgcaggacag

SEQ ID NO: 277978 - DNA, 25 bp, probe
tccccagctggtgtgtgcaggacag

SEQ ID NO: 277979 - DNA, 25 bp, probe
tccccatcctgtgttgatgatataa

SEQ ID NO: 277980 - DNA, 25 bp, probe
tccctccctgcgttttattaaatga

SEQ ID NO: 277981 - DNA, 25 bp, probe
tcccttctcgtgtttgcttaaaata

SEQ ID NO: 277982 - DNA, 25 bp, probe
tccctttctgtgcttgccaatagtt

SEQ ID NO: 277983 - DNA, 25 bp, probe
tccctttgctggcttgtgcagtgat

SEQ ID NO: 277984 - DNA, 25 bp, probe
tcccttctgtacaggacaatgaccc

SEQ ID NO: 277985 - DNA, 25 bp, probe
tccctcctggtcagtacatggattc

SEQ ID NO: 277986 - DNA, 25 bp, probe
tccgcctctcgggttcaagagattc

SEQ ID NO: 277987 - DNA, 25 bp, probe
tccgcctctcgggttcaagagattc

SEQ ID NO: 277988 - DNA, 25 bp, probe
tccgcctcctgggttgaagcgattc

SEQ ID NO: 277989 - DNA, 25 bp, probe
tccccttctgggagacacagttgga

SEQ ID NO: 277990 - DNA, 25 bp, probe
tccccttctgggagacacagttgga

SEQ ID NO: 277991 - DNA, 25 bp, probe
tccccagtgctgggatggcacacag

SEQ ID NO: 277992 - DNA, 25 bp, probe
tccccagtctgcgggaggcagtggt

SEQ ID NO: 277993 - DNA, 25 bp, probe
tccccagagctggcgaagaagtcct

SEQ ID NO: 277994 - DNA, 25 bp, probe
tcccacgactcagtgaagtttctcc

SEQ ID NO: 277995 - DNA, 25 bp, probe
tcaccagggtctcaagtttcctgcc

SEQ ID NO: 277996 - DNA, 25 bp, probe
tcccgtgaatgtgaagttccccatc

SEQ ID NO: 277997 - DNA, 25 bp, probe
tctaccgagattgaccttcacgtgt

SEQ ID NO: 277998 - DNA, 25 bp, probe
tcggcacctgttaaacttggaggct

SEQ ID NO: 277999 - DNA, 25 bp, probe
tcggctcccacggagaccgtgggct

SEQ ID NO: 278000 - DNA, 25 bp, probe
tcgggcacccaggaatgcgggggtc

SEQ ID NO: 278001 - DNA, 25 bp, probe
tcgtgggagccccagggggagtggc

SEQ ID NO: 278002 - DNA, 25 bp, probe
tctagggaaccgtggggcagggtgg

SEQ ID NO: 278003 - DNA, 25 bp, probe
tcgtgttaacggaggcggtgggagg

SEQ ID NO: 278004 - DNA, 25 bp, probe
tcgtgttaacggaggcggtgggagg

SEQ ID NO: 278005 - DNA, 25 bp, probe
tctttttccgcgtgtcggaggagca

SEQ ID NO: 278006 - DNA, 25 bp, probe
tcccttcccggatgatccgaaagac

SEQ ID NO: 278007 - DNA, 25 bp, probe
tccctatcccggagttcagaaccat

SEQ ID NO: 278008 - DNA, 25 bp, probe
tcccttcctttgttttcataagcct

SEQ ID NO: 278009 - DNA, 25 bp, probe
tcccaacctgtttcttctcaaaggg

SEQ ID NO: 278010 - DNA, 25 bp, probe
tcccaacctgggattccagaagatc

SEQ ID NO: 278011 - DNA, 25 bp, probe
tcccaacaaagacatactccaatga

SEQ ID NO: 278012 - DNA, 25 bp, probe
tcccgttggagacacatctggaatt

SEQ ID NO: 278013 - DNA, 25 bp, probe
tcccgatgggcgacaactcggagct

SEQ ID NO: 278014 - DNA, 25 bp, probe
tccctgcggggcaaacagcggatga

SEQ ID NO: 278015 - DNA, 25 bp, probe
tccctgcggggcaaacagcggatga

SEQ ID NO: 278016 - DNA, 25 bp, probe
tccctgcggggcaaacagcggatga

SEQ ID NO: 278017 - DNA, 25 bp, probe
tcccctagtgagggactgtgttgac

SEQ ID NO: 278018 - DNA, 25 bp, probe
tcccctcggagaagagctgttcaca

SEQ ID NO: 278019 - DNA, 25 bp, probe
tcccactgggaaaacgtctcaggtg

SEQ ID NO: 278020 - DNA, 25 bp, probe
tccctcgggaagccacctaagaatg

SEQ ID NO: 278021 - DNA, 25 bp, probe
tctacatcagatcaaaacactaagt

SEQ ID NO: 278022 - DNA, 25 bp, probe
tccctagatgaaaaactccagtgtc

SEQ ID NO: 278023 - DNA, 25 bp, probe
tcccagaatggaaagtcccagtggt

SEQ ID NO: 278024 - DNA, 25 bp, probe
tcccagaatgtgtcactgtcttacc

SEQ ID NO: 278025 - DNA, 25 bp, probe
tcccagaatgtgtcactgtcttacc

SEQ ID NO: 278026 - DNA, 25 bp, probe
tcccaaagtggcttaggtagccctt

SEQ ID NO: 278027 - DNA, 25 bp, probe
tcccaaaaggccttagtgagcgagt

SEQ ID NO: 278028 - DNA, 25 bp, probe
tcccagaaagactccggagctgcct

SEQ ID NO: 278029 - DNA, 25 bp, probe
tcccgaggagcaccccgtgctgctg

SEQ ID NO: 278030 - DNA, 25 bp, probe
tccctggttgagtgcagcctgttgt

SEQ ID NO: 278031 - DNA, 25 bp, probe
tccctggttgagtgcagcctgttgt

SEQ ID NO: 278032 - DNA, 25 bp, probe
tcccgttcatggccacggtgttgga

SEQ ID NO: 278033 - DNA, 25 bp, probe
tcgcagcagtttcggcgggtgttcg

SEQ ID NO: 278034 - DNA, 25 bp, probe
tcgcgagctctacttagggcttcgc

SEQ ID NO: 278035 - DNA, 25 bp, probe
tcgaaccagaggagttcttgcgccc

SEQ ID NO: 278036 - DNA, 25 bp, probe
tcgaagcacgggacacatgtttcac

SEQ ID NO: 278037 - DNA, 25 bp, probe
tccccagaggtgaccactttcaact

SEQ ID NO: 278038 - DNA, 25 bp, probe
tccctaagccataaactgtctcacc

SEQ ID NO: 278039 - DNA, 25 bp, probe
tccctagagccacaggttctcattc

SEQ ID NO: 278040 - DNA, 25 bp, probe
tcccaaagcccacgagttgctgaat

SEQ ID NO: 278041 - DNA, 25 bp, probe
tcccaagacatcaatcaatctttaa

SEQ ID NO: 278042 - DNA, 25 bp, probe
tcccaaactattctcttttacttct

SEQ ID NO: 278043 - DNA, 25 bp, probe
tacgtaccaattcttttgtcttttg

SEQ ID NO: 278044 - DNA, 25 bp, probe
tcaggtaaaaatttctcttggcttt

SEQ ID NO: 278045 - DNA, 25 bp, probe
tcgagttcagatccgtttccggttt

SEQ ID NO: 278046 - DNA, 25 bp, probe
tcggcattaatccgtttatgtgatg

SEQ ID NO: 278047 - DNA, 25 bp, probe
tcccattgtctatgcatttatgaat

SEQ ID NO: 278048 - DNA, 25 bp, probe
tccccatgttattcttttaagtgta

SEQ ID NO: 278049 - DNA, 25 bp, probe
tcccaagaaatagttgatgaatttg

SEQ ID NO: 278050 - DNA, 25 bp, probe
tcccaagagattatgtaactcctcc

SEQ ID NO: 278051 - DNA, 25 bp, probe
tcccaagtgtaaaataccctcacca

SEQ ID NO: 278052 - DNA, 25 bp, probe
tcagaaagtttgagttccctgcccc

SEQ ID NO: 278053 - DNA, 25 bp, probe
tcgaaggctttgagtatatcaaccc

SEQ ID NO: 278054 - DNA, 25 bp, probe
tctccatggctttgggacatttaca

SEQ ID NO: 278055 - DNA, 25 bp, probe
tctggctggaaggggactattttcg

SEQ ID NO: 278056 - DNA, 25 bp, probe
tcggtccaacgttattcatcaattc

SEQ ID NO: 278057 - DNA, 25 bp, probe
tcgtccacaatagtcaatcctaatt

SEQ ID NO: 278058 - DNA, 25 bp, probe
tcgtctctggtagctgcagccaaat

SEQ ID NO: 278059 - DNA, 25 bp, probe
tccctctctgatgccacatgcaaaa

SEQ ID NO: 278060 - DNA, 25 bp, probe
tccctctcagcagctagatgcatgc

SEQ ID NO: 278061 - DNA, 25 bp, probe
tccctctcagcagctagatgcatgc

SEQ ID NO: 278062 - DNA, 25 bp, probe
tccctctctgccaatgaatgtgcct

SEQ ID NO: 278063 - DNA, 25 bp, probe
tccctctctgccaatgaatgtgcct

SEQ ID NO: 278064 - DNA, 25 bp, probe
tccctccactctacaaggagctctt

SEQ ID NO: 278065 - DNA, 25 bp, probe
tcccacctctctgaatagtgtgtat

SEQ ID NO: 278066 - DNA, 25 bp, probe
tcccactgttctgaaaggagacatt

SEQ ID NO: 278067 - DNA, 25 bp, probe
tcccctgacactgaagaggatccac

SEQ ID NO: 278068 - DNA, 25 bp, probe
tccccagagactagtgagagtcatc

SEQ ID NO: 278069 - DNA, 25 bp, probe
tccccaggacttggtgcagttctca

SEQ ID NO: 278070 - DNA, 25 bp, probe
tccccaggacttggtgcagttctca

SEQ ID NO: 278071 - DNA, 25 bp, probe
tctcactggcaagctcttgcagttc

SEQ ID NO: 278072 - DNA, 25 bp, probe
tcgactgtggaccttgtattctccg

SEQ ID NO: 278073 - DNA, 25 bp, probe
tcgacttctacgacttattattctg

SEQ ID NO: 278074 - DNA, 25 bp, probe
tcggctgtctcagactctttttgta

SEQ ID NO: 278075 - DNA, 25 bp, probe
tcggctgtctcagactctttttgta

SEQ ID NO: 278076 - DNA, 25 bp, probe
tcccatgatacagacattggcttgt

SEQ ID NO: 278077 - DNA, 25 bp, probe
tcccatgatacagacattggcttgt

SEQ ID NO: 278078 - DNA, 25 bp, probe
tcccatgcataacacactactggat

SEQ ID NO: 278079 - DNA, 25 bp, probe
tcccgcatggacgaagccacatggt

SEQ ID NO: 278080 - DNA, 25 bp, probe
tcccgcatggacgaagccacatggt

SEQ ID NO: 278081 - DNA, 25 bp, probe
tccctgcagcgtgagatccagatgg

SEQ ID NO: 278082 - DNA, 25 bp, probe
tccctgcagcgtgagatccagatgg

SEQ ID NO: 278083 - DNA, 25 bp, probe
tccccaggctctagtgcaggaggag

SEQ ID NO: 278084 - DNA, 25 bp, probe
tccccaggctctagtgcaggaggag

SEQ ID NO: 278085 - DNA, 25 bp, probe
tcccgctgctccagtgcagagagag

SEQ ID NO: 278086 - DNA, 25 bp, probe
tccccatggctcagcgagcactgag

SEQ ID NO: 278087 - DNA, 25 bp, probe
tccccatatccaagtaccaatgctg

SEQ ID NO: 278088 - DNA, 25 bp, probe
tccctctaccacgtatatgaggtga

SEQ ID NO: 278089 - DNA, 25 bp, probe
tcgccgtacaccagctatagcgtgc

SEQ ID NO: 278090 - DNA, 25 bp, probe
tccctgtaacatgccatagtgcgcc

SEQ ID NO: 278091 - DNA, 25 bp, probe
tccctgaaacctgcatagagtttgc

SEQ ID NO: 278092 - DNA, 25 bp, probe
tcccgcagaacctgaagatgttcgc

SEQ ID NO: 278093 - DNA, 25 bp, probe
tcccgagtaccagtgacacgtctcg

SEQ ID NO: 278094 - DNA, 25 bp, probe
tcgcacgagtagtgggtcgtcttgt

SEQ ID NO: 278095 - DNA, 25 bp, probe
tcgcacgagtagtgggtcgtcttgt

SEQ ID NO: 278096 - DNA, 25 bp, probe
tcgactgcaaagcgaggtagccggt

SEQ ID NO: 278097 - DNA, 25 bp, probe
tcgactgcaaagcgaggtagccggt

SEQ ID NO: 278098 - DNA, 25 bp, probe
tccctaacaggaaggtgtccagttc

SEQ ID NO: 278099 - DNA, 25 bp, probe
tccctgacacggtgtggtccattgg

SEQ ID NO: 278100 - DNA, 25 bp, probe
tcgccgacaacgggggtctcaaggc

SEQ ID NO: 278101 - DNA, 25 bp, probe
tcgccgacaacgggggtctcaaggc

SEQ ID NO: 278102 - DNA, 25 bp, probe
tcgccgataaccaggatttacaggc

SEQ ID NO: 278103 - DNA, 25 bp, probe
tcgcctgacaaccactggtctgtag

SEQ ID NO: 278104 - DNA, 25 bp, probe
tcgcctgacaaccactggtctgtag

SEQ ID NO: 278105 - DNA, 25 bp, probe
tccctgactacctggtcatccagat

SEQ ID NO: 278106 - DNA, 25 bp, probe
tccctcaaactctgcttgaagagat

SEQ ID NO: 278107 - DNA, 25 bp, probe
tccctcattagctaccttgagcaga

SEQ ID NO: 278108 - DNA, 25 bp, probe
tcgcagtcacgatcaacttaggcat

SEQ ID NO: 278109 - DNA, 25 bp, probe
tcgcaagcctgatactctccaggct

SEQ ID NO: 278110 - DNA, 25 bp, probe
tcgcccctgagatcctacagggcct

SEQ ID NO: 278111 - DNA, 25 bp, probe
tccccgtgttcatatgtcagggcac

SEQ ID NO: 278112 - DNA, 25 bp, probe
tcccggtttcagaagctgcagctgg

SEQ ID NO: 278113 - DNA, 25 bp, probe
tccccgtgcctgtaggcatgcagtg

SEQ ID NO: 278114 - DNA, 25 bp, probe
tcccaggtgcaccatggggcaggca

SEQ ID NO: 278115 - DNA, 25 bp, probe
tcccgctgtgcccaggagagcagcg

SEQ ID NO: 278116 - DNA, 25 bp, probe
tcccctctgcagccgggaagtggaa

SEQ ID NO: 278117 - DNA, 25 bp, probe
tcccctctgtggggcagtatctggt

SEQ ID NO: 278118 - DNA, 25 bp, probe
tcccactttgagtacgtcaagaatg

SEQ ID NO: 278119 - DNA, 25 bp, probe
tcccaattaggaagtgtaagcagct

SEQ ID NO: 278120 - DNA, 25 bp, probe
tcccagattgaacttttaagagtct

SEQ ID NO: 278121 - DNA, 25 bp, probe
tctccagtgggaactcttcaaggtc

SEQ ID NO: 278122 - DNA, 25 bp, probe
tcccagagaccaacgttcaagcagt

SEQ ID NO: 278123 - DNA, 25 bp, probe
tcccaagaccccgctgaaggagcgc

SEQ ID NO: 278124 - DNA, 25 bp, probe
tcccaggcccgctgggagggtacat

SEQ ID NO: 278125 - DNA, 25 bp, probe
tccctccccaggcgtgaaggaacaa

SEQ ID NO: 278126 - DNA, 25 bp, probe
tccctcacctcagaagtaagacaac

SEQ ID NO: 278127 - DNA, 25 bp, probe
tcccaccagccagcaagctaaagca

SEQ ID NO: 278128 - DNA, 25 bp, probe
tcgccaacaccctggggaacaaggg

SEQ ID NO: 278129 - DNA, 25 bp, probe
tcgccaacaccctggggaacaaggg

SEQ ID NO: 278130 - DNA, 25 bp, probe
ttggcatactccgggaaaaaaagtg

SEQ ID NO: 278131 - DNA, 25 bp, probe
tctactaccacaaggaaaatagttt

SEQ ID NO: 278132 - DNA, 25 bp, probe
tagttaccggaacgaaatagcttat

SEQ ID NO: 278133 - DNA, 25 bp, probe
tcgttcatccggtggaaacagcctg

SEQ ID NO: 278134 - DNA, 25 bp, probe
tcgcttcaagagggtggtggagacc

SEQ ID NO: 278135 - DNA, 25 bp, probe
tcccctgctgaaggtggggattgcc

SEQ ID NO: 278136 - DNA, 25 bp, probe
tcccacttcgaagtggaggtctgcc

SEQ ID NO: 278137 - DNA, 25 bp, probe
tcccaggccgaaatggtcaacgcca

SEQ ID NO: 278138 - DNA, 25 bp, probe
tcttagtccgaatgttagattcctc

SEQ ID NO: 278139 - DNA, 25 bp, probe
tcgtggtgcctagactttgcattcc

SEQ ID NO: 278140 - DNA, 25 bp, probe
tctgggtcataaaactttgttaagg

SEQ ID NO: 278141 - DNA, 25 bp, probe
tctgggtcataaaactttgttaagg

SEQ ID NO: 278142 - DNA, 25 bp, probe
tcgaggtcaagcacacggttaaaat

SEQ ID NO: 278143 - DNA, 25 bp, probe
tcgatttatcaatcccgttttgaca

SEQ ID NO: 278144 - DNA, 25 bp, probe
tcgtacttgataaccccattttcta

SEQ ID NO: 278145 - DNA, 25 bp, probe
tcgtacttgataaccccattttcta

SEQ ID NO: 278146 - DNA, 25 bp, probe
tcgtcaagggaagttaccttttgag

SEQ ID NO: 278147 - DNA, 25 bp, probe
tcgactcaagaaggttaacattttc

SEQ ID NO: 278148 - DNA, 25 bp, probe
tcaactcaagccttggtaaccttta

SEQ ID NO: 278149 - DNA, 25 bp, probe
tccctaaggttgtacagactcttgt

SEQ ID NO: 278150 - DNA, 25 bp, probe
tccctccaacttttgcagattcttg

SEQ ID NO: 278151 - DNA, 25 bp, probe
tcttcgaaagttttgccaggtagca

SEQ ID NO: 278152 - DNA, 25 bp, probe
tcccgtggagttgtccatcgtgaca

SEQ ID NO: 278153 - DNA, 25 bp, probe
tcccgtggagttgtccatcgtgaca

SEQ ID NO: 278154 - DNA, 25 bp, probe
tccctatgggcttggaccacttaca

SEQ ID NO: 278155 - DNA, 25 bp, probe
tccctgatgggttggggcagttacc

SEQ ID NO: 278156 - DNA, 25 bp, probe
tccctgtgccagaagatcgagcagt

SEQ ID NO: 278157 - DNA, 25 bp, probe
tcccatcaccagaaatgatagcgtg

SEQ ID NO: 278158 - DNA, 25 bp, probe
tccctccagaattatgtcaggttgg

SEQ ID NO: 278159 - DNA, 25 bp, probe
tccctgggactgtttcagacttgga

SEQ ID NO: 278160 - DNA, 25 bp, probe
tcccacaggcagctttaaccattaa

SEQ ID NO: 278161 - DNA, 25 bp, probe
tcccgcagtgcaatctttcagcagc

SEQ ID NO: 278162 - DNA, 25 bp, probe
tcccgcagtgcaatctttcagcagc

SEQ ID NO: 278163 - DNA, 25 bp, probe
tcgcggatgatgtacttctctcagt

SEQ ID NO: 278164 - DNA, 25 bp, probe
tcgcggatgatgtacttctctcagt

SEQ ID NO: 278165 - DNA, 25 bp, probe
tcgcggatgaagacgcacggcagaa

SEQ ID NO: 278166 - DNA, 25 bp, probe
tcgcggatgaagacgcacggcagaa

SEQ ID NO: 278167 - DNA, 25 bp, probe
tcgctggacgacagcggcagctgcc

SEQ ID NO: 278168 - DNA, 25 bp, probe
tcgtggagaacgtggagtggcgcgt

SEQ ID NO: 278169 - DNA, 25 bp, probe
tcgtaagccaagctgtgtgtgccgg

SEQ ID NO: 278170 - DNA, 25 bp, probe
tcgagaagccaacagagcagtaagc

SEQ ID NO: 278171 - DNA, 25 bp, probe
tcaggtacaaactcgacttcagacc

SEQ ID NO: 278172 - DNA, 25 bp, probe
tcgggctaagactttaactcagagc

SEQ ID NO: 278173 - DNA, 25 bp, probe
tcgtagatcaatgtttaactcagct

SEQ ID NO: 278174 - DNA, 25 bp, probe
tcgaagtatctaattcgccctcagc

SEQ ID NO: 278175 - DNA, 25 bp, probe
tcgatagacagcataatcccctaca

SEQ ID NO: 278176 - DNA, 25 bp, probe
tcgagggagactgatcccctgacca

SEQ ID NO: 278177 - DNA, 25 bp, probe
tcgaactgcaaatatgcctccaaac

SEQ ID NO: 278178 - DNA, 25 bp, probe
tcgaactgcaaatatgcctccaaac

SEQ ID NO: 278179 - DNA, 25 bp, probe
tcgaaccaaagtcgtcactccatac

SEQ ID NO: 278180 - DNA, 25 bp, probe
tcgaggccgaaaagtcttcctcaat

SEQ ID NO: 278181 - DNA, 25 bp, probe
tcagtagcgttttagtcgttttatg

SEQ ID NO: 278182 - DNA, 25 bp, probe
tcgtacctctatcactaattcttat

SEQ ID NO: 278183 - DNA, 25 bp, probe
tctggagccctagtatctaattttt

SEQ ID NO: 278184 - DNA, 25 bp, probe
tcgcggccgctagactagtctagag

SEQ ID NO: 278185 - DNA, 25 bp, probe
tcccacgcctcagactgtgttgagg

SEQ ID NO: 278186 - DNA, 25 bp, probe
tcccacgcctcagactgtgttgagg

SEQ ID NO: 278187 - DNA, 25 bp, probe
tctctaagcctatacgtttctgtgg

SEQ ID NO: 278188 - DNA, 25 bp, probe
tcccaggcaggatgagctggggttg

SEQ ID NO: 278189 - DNA, 25 bp, probe
tcaccaccgagacagttggttttgc

SEQ ID NO: 278190 - DNA, 25 bp, probe
tcccaccgcaggatttgggctcttg

SEQ ID NO: 278191 - DNA, 25 bp, probe
tcactccccaggattatgcgcgatt

SEQ ID NO: 278192 - DNA, 25 bp, probe
tccccgcagctgcttgtggcggatt

SEQ ID NO: 278193 - DNA, 25 bp, probe
tcccaagcagctggacttccagaga

SEQ ID NO: 278194 - DNA, 25 bp, probe
tcccgagcagctgggattacaggcg

SEQ ID NO: 278195 - DNA, 25 bp, probe
tccctgaggactggcttgacagggg

SEQ ID NO: 278196 - DNA, 25 bp, probe
tcgttggatggctcttgaaagtctg

SEQ ID NO: 278197 - DNA, 25 bp, probe
tcgttggatggctcttgaaagtctg

SEQ ID NO: 278198 - DNA, 25 bp, probe
tcgattggtggtcctttggagttct

SEQ ID NO: 278199 - DNA, 25 bp, probe
tcgtaaagcgagctgacgctggttt

SEQ ID NO: 278200 - DNA, 25 bp, probe
tcggaaagctatgcttctgggcgtc

SEQ ID NO: 278201 - DNA, 25 bp, probe
tcgacaacctctattactgggacca

SEQ ID NO: 278202 - DNA, 25 bp, probe
tcccaattcatttcatctactacag

SEQ ID NO: 278203 - DNA, 25 bp, probe
tcccaattattgtaaatctgtcgta

SEQ ID NO: 278204 - DNA, 25 bp, probe
tcccaattattgtaaatctgtcgta

SEQ ID NO: 278205 - DNA, 25 bp, probe
tcccaaatttcatacctatcatctt

SEQ ID NO: 278206 - DNA, 25 bp, probe
tcccaaagattaacttccaacttat

SEQ ID NO: 278207 - DNA, 25 bp, probe
tcccaagagacgaggaccggcctat

SEQ ID NO: 278208 - DNA, 25 bp, probe
tcccaaggacgatgggttcctcaac

SEQ ID NO: 278209 - DNA, 25 bp, probe
tccctctggcctttgggttgttcaa

SEQ ID NO: 278210 - DNA, 25 bp, probe
tccctcgtcaatttgggttgtgtcc

SEQ ID NO: 278211 - DNA, 25 bp, probe
tccctcgtcaatttgggttgtgtcc

SEQ ID NO: 278212 - DNA, 25 bp, probe
tcccgtgtggatatgaggctggtgt

SEQ ID NO: 278213 - DNA, 25 bp, probe
tcccgctgcggaatgggcgggtggc

SEQ ID NO: 278214 - DNA, 25 bp, probe
tcccagccagcggattgggggtggc

SEQ ID NO: 278215 - DNA, 25 bp, probe
tcccgtgcatgggttggctgtgggg

SEQ ID NO: 278216 - DNA, 25 bp, probe
tcccgtgcatgggttggctgtgggg

SEQ ID NO: 278217 - DNA, 25 bp, probe
tcccgtgcatgggttggctgtgggg

SEQ ID NO: 278218 - DNA, 25 bp, probe
tcccactgcagggcttgctggagag

SEQ ID NO: 278219 - DNA, 25 bp, probe
tcccccagcacagatgaggagcagc

SEQ ID NO: 278220 - DNA, 25 bp, probe
tcccgcaccacggagaaggagctgc

SEQ ID NO: 278221 - DNA, 25 bp, probe
tcccgacagacgggagcagggcatg

SEQ ID NO: 278222 - DNA, 25 bp, probe
tcccgagaggcgtgatgcaggggtg

SEQ ID NO: 278223 - DNA, 25 bp, probe
tccctgcaagggtgactcgggcggg

SEQ ID NO: 278224 - DNA, 25 bp, probe
tccctgaaagattaagccctgaagg

SEQ ID NO: 278225 - DNA, 25 bp, probe
tcccattaaatggacagcaccggaa

SEQ ID NO: 278226 - DNA, 25 bp, probe
tcggcttagactgggtgcccaagaa

SEQ ID NO: 278227 - DNA, 25 bp, probe
tcgacagtgaatacacggcccaaga

SEQ ID NO: 278228 - DNA, 25 bp, probe
tcccagtacatcgagtggctgcaaa

SEQ ID NO: 278229 - DNA, 25 bp, probe
tcccttgcacagtcagggccaagag

SEQ ID NO: 278230 - DNA, 25 bp, probe
tcccttgccaacttacatcagaaaa

SEQ ID NO: 278231 - DNA, 25 bp, probe
tctccttgccacgttaataaagcca

SEQ ID NO: 278232 - DNA, 25 bp, probe
tcccttgccatcctaaaagccaccc

SEQ ID NO: 278233 - DNA, 25 bp, probe
tcgcctctggcagcgaaaagacccc

SEQ ID NO: 278234 - DNA, 25 bp, probe
tcgctctctcccgggaaagaacagg

SEQ ID NO: 278235 - DNA, 25 bp, probe
tccctatgtcctgtgacctacaagg

SEQ ID NO: 278236 - DNA, 25 bp, probe
tccctttttcagtaccatccaatgg

SEQ ID NO: 278237 - DNA, 25 bp, probe
tccctttttcagtaccatccaatgg

SEQ ID NO: 278238 - DNA, 25 bp, probe
tccctttttcagtaccatccaatgg

SEQ ID NO: 278239 - DNA, 25 bp, probe
tccctaggtgggtcaactccaaggc

SEQ ID NO: 278240 - DNA, 25 bp, probe
tccctacttttgccaatcccagggc

SEQ ID NO: 278241 - DNA, 25 bp, probe
tccctacttttgccaatcccagggc

SEQ ID NO: 278242 - DNA, 25 bp, probe
tctccgccttgtaaaaccactggac

SEQ ID NO: 278243 - DNA, 25 bp, probe
ttcggactttccaaagcactgcgtg

SEQ ID NO: 278244 - DNA, 25 bp, probe
tccctggtttcgcagagcactgaag

SEQ ID NO: 278245 - DNA, 25 bp, probe
tccctgttgggacgcagaggcaaag

SEQ ID NO: 278246 - DNA, 25 bp, probe
tccctgttgggacgcagaggcaaag

SEQ ID NO: 278247 - DNA, 25 bp, probe
tcccaggggacacagaggaagaggt

SEQ ID NO: 278248 - DNA, 25 bp, probe
tcccaggggacacagaggaagaggt

SEQ ID NO: 278249 - DNA, 25 bp, probe
tcccaggggaacgaggagatctgtg

SEQ ID NO: 278250 - DNA, 25 bp, probe
tcccagggggcaggcacttactggt

SEQ ID NO: 278251 - DNA, 25 bp, probe
tcccagaccgagagcgcttagtagg

SEQ ID NO: 278252 - DNA, 25 bp, probe
tcccgaggcacattcaccattagta

SEQ ID NO: 278253 - DNA, 25 bp, probe
tcccgagacacttcagtttggccac

SEQ ID NO: 278254 - DNA, 25 bp, probe
tcccgtcctctggaggatatggcca

SEQ ID NO: 278255 - DNA, 25 bp, probe
tcccttgtctcagatggtgtgtcca

SEQ ID NO: 278256 - DNA, 25 bp, probe
tcccggtgtatgcagtggtgatgcc

SEQ ID NO: 278257 - DNA, 25 bp, probe
tcccggatatctctggagctggcac

SEQ ID NO: 278258 - DNA, 25 bp, probe
tccctcagatttccattgtgtggcc

SEQ ID NO: 278259 - DNA, 25 bp, probe
tccctcgtggtccatgacgtggaat

SEQ ID NO: 278260 - DNA, 25 bp, probe
tcccgagtggctcctgacaggagca

SEQ ID NO: 278261 - DNA, 25 bp, probe
tcccgagtagctgggactgcaggcg

SEQ ID NO: 278262 - DNA, 25 bp, probe
tcccggctgaatgagaccacggaga

SEQ ID NO: 278263 - DNA, 25 bp, probe
tcccgtggaagattaaagggctgaa

SEQ ID NO: 278264 - DNA, 25 bp, probe
tcactcgtgcccaaagaaagggcca

SEQ ID NO: 278265 - DNA, 25 bp, probe
tcgctattcccaggcagggagggaa

SEQ ID NO: 278266 - DNA, 25 bp, probe
tcgcgggtcgaccgggagaggaagg

SEQ ID NO: 278267 - DNA, 25 bp, probe
tcgttgttggaccggctacgtaagc

SEQ ID NO: 278268 - DNA, 25 bp, probe
tcgattgatttacggcgctaaggat

SEQ ID NO: 278269 - DNA, 25 bp, probe
tcgatcttcataacggacaaactga

SEQ ID NO: 278270 - DNA, 25 bp, probe
tcgatcttcataacggacaaactga

SEQ ID NO: 278271 - DNA, 25 bp, probe
tcgccctcatgagcgagaccgtcaa

SEQ ID NO: 278272 - DNA, 25 bp, probe
tcgccctcatgagcgagaccgtcaa

SEQ ID NO: 278273 - DNA, 25 bp, probe
tccctccatgtggccgacatgggca

SEQ ID NO: 278274 - DNA, 25 bp, probe
tccctgtctcaggtcaagcagtggc

SEQ ID NO: 278275 - DNA, 25 bp, probe
tccctagctctctgcactgagctga

SEQ ID NO: 278276 - DNA, 25 bp, probe
tccctagctctctgcactgagctga

SEQ ID NO: 278277 - DNA, 25 bp, probe
tccctgatcaccagctgcaacatga

SEQ ID NO: 278278 - DNA, 25 bp, probe
tcgacagtcgccaagtggaccatcg

SEQ ID NO: 278279 - DNA, 25 bp, probe
tcgaaactgcatgttgcgagatgac

SEQ ID NO: 278280 - DNA, 25 bp, probe
tcgccaggcgttttctgagcatacc

SEQ ID NO: 278281 - DNA, 25 bp, probe
tctccagaggttatttctaccccac

SEQ ID NO: 278282 - DNA, 25 bp, probe
tcccaaggcatatttctcctagacc

SEQ ID NO: 278283 - DNA, 25 bp, probe
tccctgggatacatctccaaggccg

SEQ ID NO: 278284 - DNA, 25 bp, probe
tccctgggatacatctccaaggccg

SEQ ID NO: 278285 - DNA, 25 bp, probe
tcccgggaagcgactacattgacca

SEQ ID NO: 278286 - DNA, 25 bp, probe
tccctgaaaggcgctacattgagaa

SEQ ID NO: 278287 - DNA, 25 bp, probe
tccctgcagcaaatctccaaaatga

SEQ ID NO: 278288 - DNA, 25 bp, probe
tccctggcaattccctcaaaaatta

SEQ ID NO: 278289 - DNA, 25 bp, probe
tccctggcaattccctcaaaaatta

SEQ ID NO: 278290 - DNA, 25 bp, probe
tcccttgaattcaccacacacatac

SEQ ID NO: 278291 - DNA, 25 bp, probe
tctttagtactcaaggcaaaccagc

SEQ ID NO: 278292 - DNA, 25 bp, probe
tcttctttttcatgtaaaccactgg

SEQ ID NO: 278293 - DNA, 25 bp, probe
tcttctttttcatgtaaaccactgg

SEQ ID NO: 278294 - DNA, 25 bp, probe
tttttttaatgtcaacaccaatagg

SEQ ID NO: 278295 - DNA, 25 bp, probe
tcccttatctacctcaaacccaagg

SEQ ID NO: 278296 - DNA, 25 bp, probe
tccctgtatctatatctatacctgg

SEQ ID NO: 278297 - DNA, 25 bp, probe
tcgccatgtacttgaactactgtcg

SEQ ID NO: 278298 - DNA, 25 bp, probe
tcccatgtcacctcagctgatatta

SEQ ID NO: 278299 - DNA, 25 bp, probe
tcccatcaactcactatatatatga

SEQ ID NO: 278300 - DNA, 25 bp, probe
tcccatccccattccatgatgaaga

SEQ ID NO: 278301 - DNA, 25 bp, probe
tccctgggccattccaaagatgaga

SEQ ID NO: 278302 - DNA, 25 bp, probe
tccctcggccagtgcagttggatga

SEQ ID NO: 278303 - DNA, 25 bp, probe
tccctggtcactctcatgttggaca

SEQ ID NO: 278304 - DNA, 25 bp, probe
tccctgcgtctcagacatgttgaga

SEQ ID NO: 278305 - DNA, 25 bp, probe
tccctgcgtctcagacatgttgaga

SEQ ID NO: 278306 - DNA, 25 bp, probe
tccctgtgacacagcttgtacagtc

SEQ ID NO: 278307 - DNA, 25 bp, probe
tccctctgccacagttatcaagaat

SEQ ID NO: 278308 - DNA, 25 bp, probe
tccctctctgccagtgtttgggtgg

SEQ ID NO: 278309 - DNA, 25 bp, probe
tccctcctgccatgtgtaagttgta

SEQ ID NO: 278310 - DNA, 25 bp, probe
tccctcctgccatgtgtaagttgta

SEQ ID NO: 278311 - DNA, 25 bp, probe
tccctcctgtgaagttacactgtag

SEQ ID NO: 278312 - DNA, 25 bp, probe
tcccatcttgtggtggtcaccattt

SEQ ID NO: 278313 - DNA, 25 bp, probe
tcccatcttgtggtggtcaccattt

SEQ ID NO: 278314 - DNA, 25 bp, probe
tcccatgtcgtgttggttactataa

SEQ ID NO: 278315 - DNA, 25 bp, probe
tcccatgctttgtaggtgtctcata

SEQ ID NO: 278316 - DNA, 25 bp, probe
tcccattttgatggtgtctgtgaca

SEQ ID NO: 278317 - DNA, 25 bp, probe
tcgccttttaggctcaggacggaag

SEQ ID NO: 278318 - DNA, 25 bp, probe
tcgcctttacaacgccagggggcgg

SEQ ID NO: 278319 - DNA, 25 bp, probe
tcccttcaaacgcctgggagggcgg

SEQ ID NO: 278320 - DNA, 25 bp, probe
tcccataaatcactggggggctggg

SEQ ID NO: 278321 - DNA, 25 bp, probe
tcccagcaactacagagaaggcctg

SEQ ID NO: 278322 - DNA, 25 bp, probe
tcccagagagcccgaggaggtgtct

SEQ ID NO: 278323 - DNA, 25 bp, probe
tcccagagagcccgaggaggtgtct

SEQ ID NO: 278324 - DNA, 25 bp, probe
tccctggagatctgcaggcggctgg

SEQ ID NO: 278325 - DNA, 25 bp, probe
tccctggagatctgcaggcggctgg

SEQ ID NO: 278326 - DNA, 25 bp, probe
tccctgagagccacaggtgcctgga

SEQ ID NO: 278327 - DNA, 25 bp, probe
tcccggagcagcatcgtgggcaggc

SEQ ID NO: 278328 - DNA, 25 bp, probe
tccctgcggcagaggctgaggccga

SEQ ID NO: 278329 - DNA, 25 bp, probe
tccctggtgcagaggtgagcagagg

SEQ ID NO: 278330 - DNA, 25 bp, probe
tccctcttgccaagcgaggcagcag

SEQ ID NO: 278331 - DNA, 25 bp, probe
tcgccctaccaagagggcacctgag

SEQ ID NO: 278332 - DNA, 25 bp, probe
tcgcccgataaagacggattctaag

SEQ ID NO: 278333 - DNA, 25 bp, probe
tcccttgttcaaccacaaccattaa

SEQ ID NO: 278334 - DNA, 25 bp, probe
tcccttttgcattgccaagtgccat

SEQ ID NO: 278335 - DNA, 25 bp, probe
tccctttgtgattaccagatgcaca

SEQ ID NO: 278336 - DNA, 25 bp, probe
tcccattcagcactggaccagtcaa

SEQ ID NO: 278337 - DNA, 25 bp, probe
tcgacaacggctccggcatgtgcaa

SEQ ID NO: 278338 - DNA, 25 bp, probe
tccctgggagtgacggcatatgaac

SEQ ID NO: 278339 - DNA, 25 bp, probe
tccctgtggaggagctcttcaagct

SEQ ID NO: 278340 - DNA, 25 bp, probe
tcccttctgcagctttccaaagcta

SEQ ID NO: 278341 - DNA, 25 bp, probe
tccctcgctgcgatctattgaaagt

SEQ ID NO: 278342 - DNA, 25 bp, probe
tccctccattgcctctgaagagaag

SEQ ID NO: 278343 - DNA, 25 bp, probe
tcccggatgatccgaaagacaagaa

SEQ ID NO: 278344 - DNA, 25 bp, probe
tcgctcagggaccagaaccacaagc

SEQ ID NO: 278345 - DNA, 25 bp, probe
tcgtcggtccgggctgccacgacca

SEQ ID NO: 278346 - DNA, 25 bp, probe
tcgatcccttctgaggtatggccca

SEQ ID NO: 278347 - DNA, 25 bp, probe
tcgctgcccttgaacagcgtcttgc

SEQ ID NO: 278348 - DNA, 25 bp, probe
tcgtcgaattctaccgtgcttggtt

SEQ ID NO: 278349 - DNA, 25 bp, probe
tctgtaacatcactatccgatgcac

SEQ ID NO: 278350 - DNA, 25 bp, probe
tccctgcagggcagattatgccagg

SEQ ID NO: 278351 - DNA, 25 bp, probe
tcgccgaggacttcacaatcaagct

SEQ ID NO: 278352 - DNA, 25 bp, probe
tcgccgaggacttcacaatcaagct

SEQ ID NO: 278353 - DNA, 25 bp, probe
tcccaaggagcaatacatcgaagca

SEQ ID NO: 278354 - DNA, 25 bp, probe
tccctgaggacaacgatgaaccacc

SEQ ID NO: 278355 - DNA, 25 bp, probe
tcgcgcaaggactcgctggacgaca

SEQ ID NO: 278356 - DNA, 25 bp, probe
tcagtggaggtctgagaatgacgat

SEQ ID NO: 278357 - DNA, 25 bp, probe
tcgccgacgtcatgggcataggtga

SEQ ID NO: 278358 - DNA, 25 bp, probe
tcgcgaggcatttggagagcaaggg

SEQ ID NO: 278359 - DNA, 25 bp, probe
tcgctagatgtctgcgaggccatgg

SEQ ID NO: 278360 - DNA, 25 bp, probe
tcgtcaacttgccgatgtgccggga

SEQ ID NO: 278361 - DNA, 25 bp, probe
tccctatccgctggatgtcttggga

SEQ ID NO: 278362 - DNA, 25 bp, probe
tccctatccgctggatgtcttggga

SEQ ID NO: 278363 - DNA, 25 bp, probe
tccctatccgctggatgtcttggga

SEQ ID NO: 278364 - DNA, 25 bp, probe
tccctatccgctggatgtcttggga

SEQ ID NO: 278365 - DNA, 25 bp, probe
tccctcacactgcatgtgatttgga

SEQ ID NO: 278366 - DNA, 25 bp, probe
tcgctctgcaacttttctatctgag

SEQ ID NO: 278367 - DNA, 25 bp, probe
tcgctctgcaacttttctatctgag

SEQ ID NO: 278368 - DNA, 25 bp, probe
tcgtcatcaactccttttacattgt

SEQ ID NO: 278369 - DNA, 25 bp, probe
tcgccagaatttgtttgatcagtgt

SEQ ID NO: 278370 - DNA, 25 bp, probe
tcgccagcatttcgatcctcgtcag

SEQ ID NO: 278371 - DNA, 25 bp, probe
tcccacagcctgggctgacgtcaga

SEQ ID NO: 278372 - DNA, 25 bp, probe
tcccagcactttgggaggccgaggt

SEQ ID NO: 278373 - DNA, 25 bp, probe
tcgtagccgttctgattcaagagct

SEQ ID NO: 278374 - DNA, 25 bp, probe
tcgaagctcaggccatagtttcaga

SEQ ID NO: 278375 - DNA, 25 bp, probe
tcgaagctcaggccatagtttcaga

SEQ ID NO: 278376 - DNA, 25 bp, probe
tcgacgtgtgtgtcatggcttaaaa

SEQ ID NO: 278377 - DNA, 25 bp, probe
ttgaccggtaagctgtccaaaaaca

SEQ ID NO: 278378 - DNA, 25 bp, probe
tcaggcgggttactttccaggaaga

SEQ ID NO: 278379 - DNA, 25 bp, probe
tcaggcgggttactttccaggaaga

SEQ ID NO: 278380 - DNA, 25 bp, probe
tcaaagggggaccttctactcagaa

SEQ ID NO: 278381 - DNA, 25 bp, probe
tcaaagggggaccttctactcagaa

SEQ ID NO: 278382 - DNA, 25 bp, probe
tcgaagggtggattttctccttcag

SEQ ID NO: 278383 - DNA, 25 bp, probe
tcccagctggtgattgtttccgtaa

SEQ ID NO: 278384 - DNA, 25 bp, probe
tcccagtggattatatctttcttat

SEQ ID NO: 278385 - DNA, 25 bp, probe
tcgccctggaagaagcctcttttat

SEQ ID NO: 278386 - DNA, 25 bp, probe
tcgccactggagatatcccgtttca

SEQ ID NO: 278387 - DNA, 25 bp, probe
tcgccactggagatatcccgtttca

SEQ ID NO: 278388 - DNA, 25 bp, probe
tcgccaggaagattatcccagcttg

SEQ ID NO: 278389 - DNA, 25 bp, probe
tcgcgaggcaaggctacaggtgcat

SEQ ID NO: 278390 - DNA, 25 bp, probe
tctcaaggcggcctatcgggcttac

SEQ ID NO: 278391 - DNA, 25 bp, probe
tctcaaggcggcctatcgggcttac

SEQ ID NO: 278392 - DNA, 25 bp, probe
tctccagagggccatatcccgaaac

SEQ ID NO: 278393 - DNA, 25 bp, probe
tctgaggaattccttccccaaattt

SEQ ID NO: 278394 - DNA, 25 bp, probe
tagggatttttcctccaaagagatt

SEQ ID NO: 278395 - DNA, 25 bp, probe
tcgggttttggctttcagcaattct

SEQ ID NO: 278396 - DNA, 25 bp, probe
tcgggttctatttctgtatgccctt

SEQ ID NO: 278397 - DNA, 25 bp, probe
tcgagggtctaaaattatctggtaa

SEQ ID NO: 278398 - DNA, 25 bp, probe
tcgaggagcactgtacatttgggga

SEQ ID NO: 278399 - DNA, 25 bp, probe
tcgacggcacctgcaattttgtgca

SEQ ID NO: 278400 - DNA, 25 bp, probe
tcgacctgtccttcaatgttgataa

SEQ ID NO: 278401 - DNA, 25 bp, probe
tcggcctatccattactgggcaata

SEQ ID NO: 278402 - DNA, 25 bp, probe
tcggcctatccattactgggcaata

SEQ ID NO: 278403 - DNA, 25 bp, probe
tcaggtttctactgctaggcaattg

SEQ ID NO: 278404 - DNA, 25 bp, probe
tcgagttatccatgccttcaacatg

SEQ ID NO: 278405 - DNA, 25 bp, probe
tcgttgtacgactatcttcagctta

SEQ ID NO: 278406 - DNA, 25 bp, probe
tcgatcttgcatggagcaatctcgc

SEQ ID NO: 278407 - DNA, 25 bp, probe
tcgattcaatgcccgatgcttctgt

SEQ ID NO: 278408 - DNA, 25 bp, probe
tcgatcacagaccaggcagctggca

SEQ ID NO: 278409 - DNA, 25 bp, probe
tcgacaagaggacatcaaaactagt

SEQ ID NO: 278410 - DNA, 25 bp, probe
tcgcccaggcgacaaaagtgctagg

SEQ ID NO: 278411 - DNA, 25 bp, probe
tcgcccaggcgacaaaagtgctagg

SEQ ID NO: 278412 - DNA, 25 bp, probe
tccctctgtgctgtgaaactgtcta

SEQ ID NO: 278413 - DNA, 25 bp, probe
tcccattatgtacggaagcgatcca

SEQ ID NO: 278414 - DNA, 25 bp, probe
tcccaggattagagaaagcccattt

SEQ ID NO: 278415 - DNA, 25 bp, probe
tcccagtgttagggtagcatgggat

SEQ ID NO: 278416 - DNA, 25 bp, probe
tcgacatgtgcttgcatttctagcg

SEQ ID NO: 278417 - DNA, 25 bp, probe
tcgacagtcggatccatagcagcca

SEQ ID NO: 278418 - DNA, 25 bp, probe
tcgacagtcggatccatagcagcca

SEQ ID NO: 278419 - DNA, 25 bp, probe
tcgtctatcgggacatgaagcctga

SEQ ID NO: 278420 - DNA, 25 bp, probe
tcgtctatcgggacatgaagcctga

SEQ ID NO: 278421 - DNA, 25 bp, probe
tcccagcatcagccttagaacaaga

SEQ ID NO: 278422 - DNA, 25 bp, probe
tcccatcatgtgcccacagtgatca

SEQ ID NO: 278423 - DNA, 25 bp, probe
tcccatcatgtgcccacagtgatca

SEQ ID NO: 278424 - DNA, 25 bp, probe
tcccagcatggagcgcaggaaggcg

SEQ ID NO: 278425 - DNA, 25 bp, probe
tcccagcatggagcgcaggaaggcg

SEQ ID NO: 278426 - DNA, 25 bp, probe
tcccagtgggaggggcaggctgaca

SEQ ID NO: 278427 - DNA, 25 bp, probe
tcccacggagacaccatgactgtca

SEQ ID NO: 278428 - DNA, 25 bp, probe
tcccaaggtacttcaaaggctcatc

SEQ ID NO: 278429 - DNA, 25 bp, probe
tcccaaggtacttcaaaggctcatc

SEQ ID NO: 278430 - DNA, 25 bp, probe
tccctaagtactccagcagagtccc

SEQ ID NO: 278431 - DNA, 25 bp, probe
tcgcctatatgctacttagcggttt

SEQ ID NO: 278432 - DNA, 25 bp, probe
tcgcctatacgaaatatggttcctt

SEQ ID NO: 278433 - DNA, 25 bp, probe
tcgccttattttattaatcctttca

SEQ ID NO: 278434 - DNA, 25 bp, probe
tcccttattctccatgtgaaacttt

SEQ ID NO: 278435 - DNA, 25 bp, probe
tccctatgattcatggggaactcca

SEQ ID NO: 278436 - DNA, 25 bp, probe
tccctctactatggggacctcatcc

SEQ ID NO: 278437 - DNA, 25 bp, probe
tctggctcgaaaggtggagcccccc

SEQ ID NO: 278438 - DNA, 25 bp, probe
tcccactcaatacgctggagtccac

SEQ ID NO: 278439 - DNA, 25 bp, probe
tcgacctccagaccgaggtctgagc

SEQ ID NO: 278440 - DNA, 25 bp, probe
tcgaccgggagaggaaggtgagtat

SEQ ID NO: 278441 - DNA, 25 bp, probe
tctgtccagtttccaaagggcagta

SEQ ID NO: 278442 - DNA, 25 bp, probe
tcgccaagtgcctcaaagaccacaa

SEQ ID NO: 278443 - DNA, 25 bp, probe
tcccagagtggctcaggtgacaact

SEQ ID NO: 278444 - DNA, 25 bp, probe
tcccatggtcctgcagaggaacagc

SEQ ID NO: 278445 - DNA, 25 bp, probe
tcccattccttcctagtgagaagct

SEQ ID NO: 278446 - DNA, 25 bp, probe
tcgccagctagctccatagggaagc

SEQ ID NO: 278447 - DNA, 25 bp, probe
tcccactgccgggcagggcagactg

SEQ ID NO: 278448 - DNA, 25 bp, probe
tcccactggatggcaagggcacgct

SEQ ID NO: 278449 - DNA, 25 bp, probe
tcgaccgaaagcaagaggtgcctca

SEQ ID NO: 278450 - DNA, 25 bp, probe
tcgagggaatatgcgaagctgccgc

SEQ ID NO: 278451 - DNA, 25 bp, probe
tctggggactccgtgggtccacgga

SEQ ID NO: 278452 - DNA, 25 bp, probe
tctggggactccgtgggtccacgga

SEQ ID NO: 278453 - DNA, 25 bp, probe
tctggggactccgtgggtccacgga

SEQ ID NO: 278454 - DNA, 25 bp, probe
tctggggactccgtgggtccacgga

SEQ ID NO: 278455 - DNA, 25 bp, probe
tcggaggagcttctacgtgtatgcg

SEQ ID NO: 278456 - DNA, 25 bp, probe
tcattaaatttccataaggtcatgc

SEQ ID NO: 278457 - DNA, 25 bp, probe
tcccaagacttccatagaccatctg

SEQ ID NO: 278458 - DNA, 25 bp, probe
tcccaagacttccatagaccatctg

SEQ ID NO: 278459 - DNA, 25 bp, probe
tcccaagacttccatagaccatctg

SEQ ID NO: 278460 - DNA, 25 bp, probe
tcccaacaactcctatgtcaacttc

SEQ ID NO: 278461 - DNA, 25 bp, probe
tcccacctagctgtagtgaccacat

SEQ ID NO: 278462 - DNA, 25 bp, probe
tcccacctagctgtagtgaccacat

SEQ ID NO: 278463 - DNA, 25 bp, probe
tcccacctcactgtggtggccatat

SEQ ID NO: 278464 - DNA, 25 bp, probe
tcccaccagcctgttggcgaagttg

SEQ ID NO: 278465 - DNA, 25 bp, probe
tcccaccaccctatgacgaaaaagc

SEQ ID NO: 278466 - DNA, 25 bp, probe
tcccaccactccaaggactgagact

SEQ ID NO: 278467 - DNA, 25 bp, probe
tcccatcatcttggtactactagat

SEQ ID NO: 278468 - DNA, 25 bp, probe
tcgactacttcacacatactgtgat

SEQ ID NO: 278469 - DNA, 25 bp, probe
tcgagatacgggcacatacggattc

SEQ ID NO: 278470 - DNA, 25 bp, probe
tcgaagccgaggctccactaatctc

SEQ ID NO: 278471 - DNA, 25 bp, probe
tcgaagccgaggctccactaatctc

SEQ ID NO: 278472 - DNA, 25 bp, probe
tcgaagccgaggctccactaatctc

SEQ ID NO: 278473 - DNA, 25 bp, probe
tcgaaatcaggtggttagctcaacc

SEQ ID NO: 278474 - DNA, 25 bp, probe
tccctacgggtgtacagctgcacct

SEQ ID NO: 278475 - DNA, 25 bp, probe
tccctacgggtgtacagctgcacct

SEQ ID NO: 278476 - DNA, 25 bp, probe
tccctactgggatgacatctccgac

SEQ ID NO: 278477 - DNA, 25 bp, probe
tcccatttcctgagaccaccagaga

SEQ ID NO: 278478 - DNA, 25 bp, probe
tcccatttttatgatgccaacaaaa

SEQ ID NO: 278479 - DNA, 25 bp, probe
tcccatctttttgttaccataaata

SEQ ID NO: 278480 - DNA, 25 bp, probe
tcccatctttttgttaccataaata

SEQ ID NO: 278481 - DNA, 25 bp, probe
tcccagtttagtcagatggccaaaa

SEQ ID NO: 278482 - DNA, 25 bp, probe
tcccagttattgcctaatacttatt

SEQ ID NO: 278483 - DNA, 25 bp, probe
tcccatttgttgcccttgaattatc

SEQ ID NO: 278484 - DNA, 25 bp, probe
tccctttttgtggctgctatcattt

SEQ ID NO: 278485 - DNA, 25 bp, probe
tcccttttgtgcatgcaccatttct

SEQ ID NO: 278486 - DNA, 25 bp, probe
tcccttgagaagctgagtcttctgc

SEQ ID NO: 278487 - DNA, 25 bp, probe
tcgccttgaaggctcagacgtgcag

SEQ ID NO: 278488 - DNA, 25 bp, probe
tcccttcacaatcccagagtggcag

SEQ ID NO: 278489 - DNA, 25 bp, probe
tcccttctgcaattcccgggagatt

SEQ ID NO: 278490 - DNA, 25 bp, probe
tcccttctgcaattcccgggagatt

SEQ ID NO: 278491 - DNA, 25 bp, probe
tcccttcgacttcctgaagctggat

SEQ ID NO: 278492 - DNA, 25 bp, probe
tcgccaatggaattcctgactctgg

SEQ ID NO: 278493 - DNA, 25 bp, probe
tccctaggaagtgccagtgcagcgg

SEQ ID NO: 278494 - DNA, 25 bp, probe
tccctagtgacctacctgggggcaa

SEQ ID NO: 278495 - DNA, 25 bp, probe
tccctagtgacctacctgggggcaa

SEQ ID NO: 278496 - DNA, 25 bp, probe
tccctaggcctggcctatcggaggc

SEQ ID NO: 278497 - DNA, 25 bp, probe
tccctaggcctggcctatcggaggc

SEQ ID NO: 278498 - DNA, 25 bp, probe
tccctcagggtagcaccatggcagg

SEQ ID NO: 278499 - DNA, 25 bp, probe
tcccacacgtgaaaccagcatgtga

SEQ ID NO: 278500 - DNA, 25 bp, probe
tcccatcctgagaagcacagactta

SEQ ID NO: 278501 - DNA, 25 bp, probe
tcccattctgagatccagtacaatc

SEQ ID NO: 278502 - DNA, 25 bp, probe
tcgaattctgtgactccaatgccat

SEQ ID NO: 278503 - DNA, 25 bp, probe
tcgcgatgactgaacacaacccaac

SEQ ID NO: 278504 - DNA, 25 bp, probe
tcgacttcggaggcaacaccaagcc

SEQ ID NO: 278505 - DNA, 25 bp, probe
tcgccttcaggagaatctacacgca

SEQ ID NO: 278506 - DNA, 25 bp, probe
tcccttcaagagcacttcacatact

SEQ ID NO: 278507 - DNA, 25 bp, probe
tcattggtaaggcacccagtcactc

SEQ ID NO: 278508 - DNA, 25 bp, probe
tcgagtccaaggcagcctatgtcct

SEQ ID NO: 278509 - DNA, 25 bp, probe
tcgagatggcaccacaaccaagtac

SEQ ID NO: 278510 - DNA, 25 bp, probe
tagggacggacacatcaagctcacg

SEQ ID NO: 278511 - DNA, 25 bp, probe
tcgggatatgcgaggccgagtcctg

SEQ ID NO: 278512 - DNA, 25 bp, probe
tcagggtggacatggtccaggccgc

SEQ ID NO: 278513 - DNA, 25 bp, probe
tctcgactggccaaggtttggggaa

SEQ ID NO: 278514 - DNA, 25 bp, probe
tctcgatcttgccataactttacag

SEQ ID NO: 278515 - DNA, 25 bp, probe
tcgctgcttctggtgatactttggg

SEQ ID NO: 278516 - DNA, 25 bp, probe
tcgtgttctgcaatgcaggcatcat

SEQ ID NO: 278517 - DNA, 25 bp, probe
tctcgtgactatactggcatttcag

SEQ ID NO: 278518 - DNA, 25 bp, probe
tcccatgctcttcctgtattttggg

SEQ ID NO: 278519 - DNA, 25 bp, probe
tcccactttcaaaattcttctgagc

SEQ ID NO: 278520 - DNA, 25 bp, probe
tcccttatctcttcatattctttat

SEQ ID NO: 278521 - DNA, 25 bp, probe
tcccaaagctcttaattctccataa

SEQ ID NO: 278522 - DNA, 25 bp, probe
tcccaaactcattttatgagcctca

SEQ ID NO: 278523 - DNA, 25 bp, probe
tcccaaattttgttgacagcgtctc

SEQ ID NO: 278524 - DNA, 25 bp, probe
tcccaaagtccatgatgacctctcc

SEQ ID NO: 278525 - DNA, 25 bp, probe
tcatccaaggaatagactccttcgt

SEQ ID NO: 278526 - DNA, 25 bp, probe
tctggagacggcaggttcacttgcg

SEQ ID NO: 278527 - DNA, 25 bp, probe
tctgtgacacccagcgttacataat

SEQ ID NO: 278528 - DNA, 25 bp, probe
tctgtgacacccagcgttacataat

SEQ ID NO: 278529 - DNA, 25 bp, probe
tctgtaactccaatcagttcagatg

SEQ ID NO: 278530 - DNA, 25 bp, probe
tcgataagtctcagctggatgcagt

SEQ ID NO: 278531 - DNA, 25 bp, probe
tcgataaagccaagctctccagctg

SEQ ID NO: 278532 - DNA, 25 bp, probe
tcgaagaagcctacatcccagttgt

SEQ ID NO: 278533 - DNA, 25 bp, probe
tcgaagaagcctacatcccagttgt

SEQ ID NO: 278534 - DNA, 25 bp, probe
tcccaggagctcattatccagtctg

SEQ ID NO: 278535 - DNA, 25 bp, probe
tcccagaggcttctgtacagtcagg

SEQ ID NO: 278536 - DNA, 25 bp, probe
tcccagaagcgtcctgtgactctgg

SEQ ID NO: 278537 - DNA, 25 bp, probe
tcccagaagcgtcctgtgactctgg

SEQ ID NO: 278538 - DNA, 25 bp, probe
tcgcctacagcagcgggactttgca

SEQ ID NO: 278539 - DNA, 25 bp, probe
tcccaagcctacgggactgtctgca

SEQ ID NO: 278540 - DNA, 25 bp, probe
tcccagaggcaaggggacctgctgt

SEQ ID NO: 278541 - DNA, 25 bp, probe
tcccagggaactgaactcttgtgga

SEQ ID NO: 278542 - DNA, 25 bp, probe
tcagctttggacattaggtctttga

SEQ ID NO: 278543 - DNA, 25 bp, probe
tcactttggactttaccagttagga

SEQ ID NO: 278544 - DNA, 25 bp, probe
tcgtcctggccttctaaacgtagga

SEQ ID NO: 278545 - DNA, 25 bp, probe
tcgtcctggccttctaaacgtagga

SEQ ID NO: 278546 - DNA, 25 bp, probe
tcgacgaggagttcaccggggaggc

SEQ ID NO: 278547 - DNA, 25 bp, probe
tcgacgaggagttcaccggggaggc

SEQ ID NO: 278548 - DNA, 25 bp, probe
tcgccatcagggagcacctggggcg

SEQ ID NO: 278549 - DNA, 25 bp, probe
tcccaagcggttgagcctggcagag

SEQ ID NO: 278550 - DNA, 25 bp, probe
tcccaagcggttgagcctggcagag

SEQ ID NO: 278551 - DNA, 25 bp, probe
tcccagatctcggtgaacgtggagg

SEQ ID NO: 278552 - DNA, 25 bp, probe
tcccagttcggtggatggctccaga

SEQ ID NO: 278553 - DNA, 25 bp, probe
tcccagatacgttgcattgtgccaa

SEQ ID NO: 278554 - DNA, 25 bp, probe
tcgccttcctgcagaatgtgctcaa

SEQ ID NO: 278555 - DNA, 25 bp, probe
tctctgcccccaaaagtgtcaaggg

SEQ ID NO: 278556 - DNA, 25 bp, probe
tctctgcccccaaaagtgtcaaggg

SEQ ID NO: 278557 - DNA, 25 bp, probe
tcccaccttagttggttacagggtg

SEQ ID NO: 278558 - DNA, 25 bp, probe
tcccatctgcatagtttggttaagc

SEQ ID NO: 278559 - DNA, 25 bp, probe
tcccttgtggatatgctgtgtgaac

SEQ ID NO: 278560 - DNA, 25 bp, probe
tcgcgcctgggaagtgccagcagca

SEQ ID NO: 278561 - DNA, 25 bp, probe
tcgccctgggttacaaggctgcgga

SEQ ID NO: 278562 - DNA, 25 bp, probe
tcccactgtggttttaggcgcacac

SEQ ID NO: 278563 - DNA, 25 bp, probe
tcgctactggctgtgttgacggagc

SEQ ID NO: 278564 - DNA, 25 bp, probe
tcgcaaagtgccctggtacgtgcta

SEQ ID NO: 278565 - DNA, 25 bp, probe
tcgaacgcatcgcaggtgaggcttc

SEQ ID NO: 278566 - DNA, 25 bp, probe
tcgaatccctgccgttagcgactgc

SEQ ID NO: 278567 - DNA, 25 bp, probe
tcgaatcccaggccagatagctgag

SEQ ID NO: 278568 - DNA, 25 bp, probe
tcgaccagcccccaaatgtcgaaga

SEQ ID NO: 278569 - DNA, 25 bp, probe
tcgggcatgaccggaaaggccaaga

SEQ ID NO: 278570 - DNA, 25 bp, probe
tcgagggagccatcaacttccagag

SEQ ID NO: 278571 - DNA, 25 bp, probe
tcccaggaagcagaactctccagaa

SEQ ID NO: 278572 - DNA, 25 bp, probe
tcgccggtaggtaacatccctgaca

SEQ ID NO: 278573 - DNA, 25 bp, probe
tcgccggtaggtaacatccctgaca

SEQ ID NO: 278574 - DNA, 25 bp, probe
tcccaagtgatccttgactccgtgg

SEQ ID NO: 278575 - DNA, 25 bp, probe
tcccagggcatcatctaccggggac

SEQ ID NO: 278576 - DNA, 25 bp, probe
tcccagtgcccactgtagccatgga

SEQ ID NO: 278577 - DNA, 25 bp, probe
tcccagtgcccactgtagccatgga

SEQ ID NO: 278578 - DNA, 25 bp, probe
tcccagcgctgctggtcagtcgtgg

SEQ ID NO: 278579 - DNA, 25 bp, probe
tcccagcacatgtgtatcagcctgt

SEQ ID NO: 278580 - DNA, 25 bp, probe
tcccagcacatgtgtatcagcctgt

SEQ ID NO: 278581 - DNA, 25 bp, probe
tcccagcactttgtgcaccgagacc

SEQ ID NO: 278582 - DNA, 25 bp, probe
tcccaatgtttggagaccaccagcc

SEQ ID NO: 278583 - DNA, 25 bp, probe
tcccaaatgtgagattgcaaccaga

SEQ ID NO: 278584 - DNA, 25 bp, probe
tcgccatagaaagtcttgcagaccg

SEQ ID NO: 278585 - DNA, 25 bp, probe
tcgccatgatgctcctcatgggcac

SEQ ID NO: 278586 - DNA, 25 bp, probe
tcgccatgatgctcctcatgggcac

SEQ ID NO: 278587 - DNA, 25 bp, probe
tcccagagtcatcctcagttgacgc

SEQ ID NO: 278588 - DNA, 25 bp, probe
tcccagatgccttctagattcactg

SEQ ID NO: 278589 - DNA, 25 bp, probe
tcccatgcatttactagattctagc

SEQ ID NO: 278590 - DNA, 25 bp, probe
tcccactgtgtccatctatggtagc

SEQ ID NO: 278591 - DNA, 25 bp, probe
tcccttggaatgtagatggtgactt

SEQ ID NO: 278592 - DNA, 25 bp, probe
tcgctcctgggtgcagagcgtggtt

SEQ ID NO: 278593 - DNA, 25 bp, probe
tcgctgctgtgtcactcatgactgt

SEQ ID NO: 278594 - DNA, 25 bp, probe
tcgatttgctgctaccaactttggt

SEQ ID NO: 278595 - DNA, 25 bp, probe
tcgtttcagaagtgcctcactgttc

SEQ ID NO: 278596 - DNA, 25 bp, probe
tcgttatgaaaatgccttccacgca

SEQ ID NO: 278597 - DNA, 25 bp, probe
tcgtttctagaaaggctgctcctcc

SEQ ID NO: 278598 - DNA, 25 bp, probe
tcgtttctatttccgtggctatggc

SEQ ID NO: 278599 - DNA, 25 bp, probe
tcgtttctatttccgtggctatggc

SEQ ID NO: 278600 - DNA, 25 bp, probe
tcgtattacagttgacgcggccggc

SEQ ID NO: 278601 - DNA, 25 bp, probe
tctggtcaccatgagaccgacctgc

SEQ ID NO: 278602 - DNA, 25 bp, probe
tcgcgtacctgatgaaattccacaa

SEQ ID NO: 278603 - DNA, 25 bp, probe
tcgaggtcctgatgaacacctacag

SEQ ID NO: 278604 - DNA, 25 bp, probe
tcgcgcgtttgcggcaaccgcaaga

SEQ ID NO: 278605 - DNA, 25 bp, probe
tcggccatgttgagctacttcaagc

SEQ ID NO: 278606 - DNA, 25 bp, probe
tcgaccagtcagagttcgaaggctt

SEQ ID NO: 278607 - DNA, 25 bp, probe
tcgaccgctataagcgctggaagtc

SEQ ID NO: 278608 - DNA, 25 bp, probe
tcgaccgctataagcgctggaagtc

SEQ ID NO: 278609 - DNA, 25 bp, probe
tcgagacctatgagcaggagaaagc

SEQ ID NO: 278610 - DNA, 25 bp, probe
tcgacctcaagttgtgacagaagag

SEQ ID NO: 278611 - DNA, 25 bp, probe
tcgagccaaatggatatcacaggac

SEQ ID NO: 278612 - DNA, 25 bp, probe
tcgacacaacatcatcctgagtgcc

SEQ ID NO: 278613 - DNA, 25 bp, probe
tcgagcagttctccactgtgaaggg

SEQ ID NO: 278614 - DNA, 25 bp, probe
tcgcaatgattcagctcgctgagga

SEQ ID NO: 278615 - DNA, 25 bp, probe
tcgcaatgattcagctcgctgagga

SEQ ID NO: 278616 - DNA, 25 bp, probe
tcgcaccattgcggtcgcgcggatc

SEQ ID NO: 278617 - DNA, 25 bp, probe
tcgcgtcttcggagtgcttgtgaca

SEQ ID NO: 278618 - DNA, 25 bp, probe
tcgcttttctggctgactattactc

SEQ ID NO: 278619 - DNA, 25 bp, probe
tcgcctttcctgggaggatcaagct

SEQ ID NO: 278620 - DNA, 25 bp, probe
tcgcctttcctgggaggatcaagct

SEQ ID NO: 278621 - DNA, 25 bp, probe
tcgcctttcctgggtgacaatgatg

SEQ ID NO: 278622 - DNA, 25 bp, probe
tcgattattccctgtacaatattta

SEQ ID NO: 278623 - DNA, 25 bp, probe
tcgtcttcgccctctgaaattaaag

SEQ ID NO: 278624 - DNA, 25 bp, probe
tctcgtcccacctggaattgtaata

SEQ ID NO: 278625 - DNA, 25 bp, probe
tctcgtcccacctggaattgtaata

SEQ ID NO: 278626 - DNA, 25 bp, probe
tctcagaaccttggggaaggtggct

SEQ ID NO: 278627 - DNA, 25 bp, probe
tctctgtacgcccagggaaagcggc

SEQ ID NO: 278628 - DNA, 25 bp, probe
tcgctgaagccgctgtcgaaatggg

SEQ ID NO: 278629 - DNA, 25 bp, probe
tcgctgaagccgctgtcgaaatggg

SEQ ID NO: 278630 - DNA, 25 bp, probe
tcgagacagccacagtagaagcggt

SEQ ID NO: 278631 - DNA, 25 bp, probe
tcggcaagccagtcaaaaacgcccg

SEQ ID NO: 278632 - DNA, 25 bp, probe
tctggaaatcacagtaaacctcctg

SEQ ID NO: 278633 - DNA, 25 bp, probe
tcagggaaacttaattcctgcccgt

SEQ ID NO: 278634 - DNA, 25 bp, probe
tcagggaaacttaattcctgcccgt

SEQ ID NO: 278635 - DNA, 25 bp, probe
tctggggaacttacttttccttgat

SEQ ID NO: 278636 - DNA, 25 bp, probe
tctggaaatagttccgtttgtttct

SEQ ID NO: 278637 - DNA, 25 bp, probe
tcatagaccaagtcccgggggtctc

SEQ ID NO: 278638 - DNA, 25 bp, probe
tcgaacccggacgaggtggtggtgc

SEQ ID NO: 278639 - DNA, 25 bp, probe
tcgagacggcggacggggagccgga

SEQ ID NO: 278640 - DNA, 25 bp, probe
tcggacgagaagaacggggcccaga

SEQ ID NO: 278641 - DNA, 25 bp, probe
tcgagtccgaggtatgacgcggccc

SEQ ID NO: 278642 - DNA, 25 bp, probe
tctgtacgaactgatgaccggccag

SEQ ID NO: 278643 - DNA, 25 bp, probe
tctgaataaagcaggacccgcctag

SEQ ID NO: 278644 - DNA, 25 bp, probe
tctgtattggcgtggaccccaacag

SEQ ID NO: 278645 - DNA, 25 bp, probe
tcgtgatcgccgaggacttcacaat

SEQ ID NO: 278646 - DNA, 25 bp, probe
tcgtgatcgccgaggacttcacaat

SEQ ID NO: 278647 - DNA, 25 bp, probe
tcgagggcactgggttttcaaacat

SEQ ID NO: 278648 - DNA, 25 bp, probe
tctggaaagtgggtttttcaaatgg

SEQ ID NO: 278649 - DNA, 25 bp, probe
ttctaaacttggcagtttctaactt

SEQ ID NO: 278650 - DNA, 25 bp, probe
tttatgaaccggcagtttcgaaact

SEQ ID NO: 278651 - DNA, 25 bp, probe
tttatgaaccggcagtttcgaaact

SEQ ID NO: 278652 - DNA, 25 bp, probe
ttttacaggccccaattatccaata

SEQ ID NO: 278653 - DNA, 25 bp, probe
tatttccaacttgtcacttgccagt

SEQ ID NO: 278654 - DNA, 25 bp, probe
tcttcccgaccctcactggaagaga

SEQ ID NO: 278655 - DNA, 25 bp, probe
tctccccagagtcaccgggaggaga

SEQ ID NO: 278656 - DNA, 25 bp, probe
tctaccaccgagaaactgaggggga

SEQ ID NO: 278657 - DNA, 25 bp, probe
tctctcctgggacaactagggctgc

SEQ ID NO: 278658 - DNA, 25 bp, probe
tctcccggtagaccctagcaagggt

SEQ ID NO: 278659 - DNA, 25 bp, probe
tcgcccagtttcatggctaaagtgg

SEQ ID NO: 278660 - DNA, 25 bp, probe
tcgcccagtttcatggctaaagtgg

SEQ ID NO: 278661 - DNA, 25 bp, probe
tcgcccgggatcaggccaagaggat

SEQ ID NO: 278662 - DNA, 25 bp, probe
tcgtccccagagctggcgaagaagt

SEQ ID NO: 278663 - DNA, 25 bp, probe
tcgtcgccaaatgttgctgacaaac

SEQ ID NO: 278664 - DNA, 25 bp, probe
tcgtagcagcacctactatgcttca

SEQ ID NO: 278665 - DNA, 25 bp, probe
tcgttcagaagctccgcttcacatg

SEQ ID NO: 278666 - DNA, 25 bp, probe
tcggagcgcaagatcaccttaatgg

SEQ ID NO: 278667 - DNA, 25 bp, probe
tcgggtgcagagttcaccctgtgcc

SEQ ID NO: 278668 - DNA, 25 bp, probe
tcgggtgcagagttcaccctgtgcc

SEQ ID NO: 278669 - DNA, 25 bp, probe
tcgttgtggagagttgctgcctttg

SEQ ID NO: 278670 - DNA, 25 bp, probe
tcggtgtgtaaggtggcctattcct

SEQ ID NO: 278671 - DNA, 25 bp, probe
tcggatgtttctgtggacttttctt

SEQ ID NO: 278672 - DNA, 25 bp, probe
tcgcagttactggttggtgttcttc

SEQ ID NO: 278673 - DNA, 25 bp, probe
tcgagaacgcgggggagttcttccg

SEQ ID NO: 278674 - DNA, 25 bp, probe
tcggtgcaagggcttgagttcattc

SEQ ID NO: 278675 - DNA, 25 bp, probe
tctcttcataggggtcatccttttc

SEQ ID NO: 278676 - DNA, 25 bp, probe
tctctctcaacggggttcgatttaa

SEQ ID NO: 278677 - DNA, 25 bp, probe
tctctctcaacggggttcgatttaa

SEQ ID NO: 278678 - DNA, 25 bp, probe
tctgctcaataccgtgggttcttct

SEQ ID NO: 278679 - DNA, 25 bp, probe
tcccaatcctggaggtcatccatta

SEQ ID NO: 278680 - DNA, 25 bp, probe
tcgaaagcctggaggctattttgct

SEQ ID NO: 278681 - DNA, 25 bp, probe
tctgaaacaccactcctttttgtgt

SEQ ID NO: 278682 - DNA, 25 bp, probe
tctaaacttccattctgttttcttt

SEQ ID NO: 278683 - DNA, 25 bp, probe
tctagaaaacacctttaagttgcct

SEQ ID NO: 278684 - DNA, 25 bp, probe
tcttatggaactctttagaattggt

SEQ ID NO: 278685 - DNA, 25 bp, probe
tcgtcatggtaccctttgaatatag

SEQ ID NO: 278686 - DNA, 25 bp, probe
tcgggctgatcctctttatagaagg

SEQ ID NO: 278687 - DNA, 25 bp, probe
tcggggttctcctttatgaaatgct

SEQ ID NO: 278688 - DNA, 25 bp, probe
tcgaagtgttttctacagactgacc

SEQ ID NO: 278689 - DNA, 25 bp, probe
tcgaagtgttttctacagactgacc

SEQ ID NO: 278690 - DNA, 25 bp, probe
tcgcaagggtttgacacggctgcca

SEQ ID NO: 278691 - DNA, 25 bp, probe
tcgaagtgtgtatcaaaagagacta

SEQ ID NO: 278692 - DNA, 25 bp, probe
tcgacatggttctcaacaagatggc

SEQ ID NO: 278693 - DNA, 25 bp, probe
tcgaagagatcttacagactgtatc

SEQ ID NO: 278694 - DNA, 25 bp, probe
tcggatggaatctacaggcttacct

SEQ ID NO: 278695 - DNA, 25 bp, probe
tcgggatgtattactccttagccat

SEQ ID NO: 278696 - DNA, 25 bp, probe
tcgagttggagcggctcctctacac

SEQ ID NO: 278697 - DNA, 25 bp, probe
tcgagttggagcggctcctctacac

SEQ ID NO: 278698 - DNA, 25 bp, probe
tcgagttggagcggctcctctacac

SEQ ID NO: 278699 - DNA, 25 bp, probe
tcgaggacgtgcagtcgctgctgga

SEQ ID NO: 278700 - DNA, 25 bp, probe
tcgggtcatggcagactctatgcaa

SEQ ID NO: 278701 - DNA, 25 bp, probe
tctggatgtccctgagatcgtcata

SEQ ID NO: 278702 - DNA, 25 bp, probe
tcaggatccccaacaggggctcagc

SEQ ID NO: 278703 - DNA, 25 bp, probe
tcggatcaaatctcagggcttcatg

SEQ ID NO: 278704 - DNA, 25 bp, probe
tcgtgaccatattgtgaaagtgttt

SEQ ID NO: 278705 - DNA, 25 bp, probe
tctggaccaaagcaatgtggatatc

SEQ ID NO: 278706 - DNA, 25 bp, probe
tcggggcagggggtatgcagagctt

SEQ ID NO: 278707 - DNA, 25 bp, probe
tcgaagcagccgtggctactagcct

SEQ ID NO: 278708 - DNA, 25 bp, probe
tcgaagcagccgtggctactagcct

SEQ ID NO: 278709 - DNA, 25 bp, probe
tcgaaggcacagtgaaggctgtcct

SEQ ID NO: 278710 - DNA, 25 bp, probe
tctgttggcaagggtctgggtcctg

SEQ ID NO: 278711 - DNA, 25 bp, probe
tctgttggcaagggtctgggtcctg

SEQ ID NO: 278712 - DNA, 25 bp, probe
tcgggctgctacaccatggtgtcgg

SEQ ID NO: 278713 - DNA, 25 bp, probe
tcgggctgctacaccatggtgtcgg

SEQ ID NO: 278714 - DNA, 25 bp, probe
tcgggatgtggcacagacgtccatc

SEQ ID NO: 278715 - DNA, 25 bp, probe
tcccagtggagcaggctcagtcact

SEQ ID NO: 278716 - DNA, 25 bp, probe
tcccagtgtgaggagtggagcttct

SEQ ID NO: 278717 - DNA, 25 bp, probe
tcccagtgtgaggagtggagcttct

SEQ ID NO: 278718 - DNA, 25 bp, probe
tcgcatcagtggcgatgactttatt

SEQ ID NO: 278719 - DNA, 25 bp, probe
tcgcctctgtcaaagacctgtcagt

SEQ ID NO: 278720 - DNA, 25 bp, probe
tcgcctctgtcaaagacctgtcagt

SEQ ID NO: 278721 - DNA, 25 bp, probe
tcccactgcactgtggtgcttcagt

SEQ ID NO: 278722 - DNA, 25 bp, probe
tcccactgacatgtggagtgtgggg

SEQ ID NO: 278723 - DNA, 25 bp, probe
tcccagctactcgggaggctgaggc

SEQ ID NO: 278724 - DNA, 25 bp, probe
tcccagctacttgggaggctgagac

SEQ ID NO: 278725 - DNA, 25 bp, probe
tcgctcgcaaccaggtgcgcaagaa

SEQ ID NO: 278726 - DNA, 25 bp, probe
tcgagcgcgaccaggtggacgcgag

SEQ ID NO: 278727 - DNA, 25 bp, probe
tcgacatgggcgtggctgatgggcc

SEQ ID NO: 278728 - DNA, 25 bp, probe
tcgacatgggcgtggctgatgggcc

SEQ ID NO: 278729 - DNA, 25 bp, probe
tcgaattggccttcactcagggccg

SEQ ID NO: 278730 - DNA, 25 bp, probe
tcccaatcccagaactcaggactgg

SEQ ID NO: 278731 - DNA, 25 bp, probe
tcccaacctcagcaatcagcagaca

SEQ ID NO: 278732 - DNA, 25 bp, probe
tcccaacctcagcaatcagcagaca

SEQ ID NO: 278733 - DNA, 25 bp, probe
tcgccacactctgtgaggcagcaga

SEQ ID NO: 278734 - DNA, 25 bp, probe
tcgattccttgcatgagccacagtt

SEQ ID NO: 278735 - DNA, 25 bp, probe
tctggtcatcttgtggcttagttgt

SEQ ID NO: 278736 - DNA, 25 bp, probe
tctggtcagcttgctggtgaccttc

SEQ ID NO: 278737 - DNA, 25 bp, probe
tctgcgtggatcctgggtactttgg

SEQ ID NO: 278738 - DNA, 25 bp, probe
tctctttaggtctgaactggctgag

SEQ ID NO: 278739 - DNA, 25 bp, probe
tttgtttcccatcagactgtcaaga

SEQ ID NO: 278740 - DNA, 25 bp, probe
tcggtttggccacagagatcccaga

SEQ ID NO: 278741 - DNA, 25 bp, probe
tctgtgttggaagaaggaccctgat

SEQ ID NO: 278742 - DNA, 25 bp, probe
tcgtgtcgggccatgaggacacact

SEQ ID NO: 278743 - DNA, 25 bp, probe
tcggctgctggacattgacgagaca

SEQ ID NO: 278744 - DNA, 25 bp, probe
tcgccctggacttcgagcaagagat

SEQ ID NO: 278745 - DNA, 25 bp, probe
tcgcctggcttcactgaaccagatc

SEQ ID NO: 278746 - DNA, 25 bp, probe
tcagccgacttaacattacctatcc

SEQ ID NO: 278747 - DNA, 25 bp, probe
tcgcctacaagaagttccccatgag

SEQ ID NO: 278748 - DNA, 25 bp, probe
tcgcttccaagaattgcatccaccg

SEQ ID NO: 278749 - DNA, 25 bp, probe
tcgttccaagatctgtagcggccgc

SEQ ID NO: 278750 - DNA, 25 bp, probe
tcttctccaattcggggaggccctt

SEQ ID NO: 278751 - DNA, 25 bp, probe
tctttcgtatgctggggacacccag

SEQ ID NO: 278752 - DNA, 25 bp, probe
tcaccatggtactgtggggggccag

SEQ ID NO: 278753 - DNA, 25 bp, probe
tcgccgagatggtcggggtgctggc

SEQ ID NO: 278754 - DNA, 25 bp, probe
tcgccgagatggtcggggtgctggc

SEQ ID NO: 278755 - DNA, 25 bp, probe
tcgtcatggatggcggggtcctgga

SEQ ID NO: 278756 - DNA, 25 bp, probe
tcggcctgtccaggtatgtcctgga

SEQ ID NO: 278757 - DNA, 25 bp, probe
tctggactggaccttagtactgtaa

SEQ ID NO: 278758 - DNA, 25 bp, probe
tcgggcggatcacaaggtcaggaga

SEQ ID NO: 278759 - DNA, 25 bp, probe
tcgaggggacaccgatgctgacagg

SEQ ID NO: 278760 - DNA, 25 bp, probe
tctggggaaagtcgtcgcaaggcct

SEQ ID NO: 278761 - DNA, 25 bp, probe
tctggatacaagctccccagggacc

SEQ ID NO: 278762 - DNA, 25 bp, probe
tctggaaacaggacagccggggccg

SEQ ID NO: 278763 - DNA, 25 bp, probe
tcggaaccgggacctagaggcacac

SEQ ID NO: 278764 - DNA, 25 bp, probe
tcggaaccgggacctagaggcacac

SEQ ID NO: 278765 - DNA, 25 bp, probe
tcgggcccagaggccactaagagac

SEQ ID NO: 278766 - DNA, 25 bp, probe
tcggacaactcagtccctaaaaaca

SEQ ID NO: 278767 - DNA, 25 bp, probe
tcggaaaccagcactctcaaggaag

SEQ ID NO: 278768 - DNA, 25 bp, probe
tcgagaaccctgctgtacaagagag

SEQ ID NO: 278769 - DNA, 25 bp, probe
tcgtgttctcctacgtaaagatcat

SEQ ID NO: 278770 - DNA, 25 bp, probe
tcgctgtacccccagtaaagagctt

SEQ ID NO: 278771 - DNA, 25 bp, probe
tcgctgtacccccagtaaagagctt

SEQ ID NO: 278772 - DNA, 25 bp, probe
tcgctgtacccccagtaaagagctt

SEQ ID NO: 278773 - DNA, 25 bp, probe
tcgcttctcctccaggtatttgagt

SEQ ID NO: 278774 - DNA, 25 bp, probe
tcgatcctcgtcaggtgcaggtcag

SEQ ID NO: 278775 - DNA, 25 bp, probe
tcgacgtgctggctgtggagtacta

SEQ ID NO: 278776 - DNA, 25 bp, probe
tcaaattctgagcctggggggtcct

SEQ ID NO: 278777 - DNA, 25 bp, probe
tcgaggtcagggcggtggtgatggc

SEQ ID NO: 278778 - DNA, 25 bp, probe
tcgaggtcagggcggtggtgatggc

SEQ ID NO: 278779 - DNA, 25 bp, probe
tcgatggtagtcgccgtgcctacca

SEQ ID NO: 278780 - DNA, 25 bp, probe
tcgatggtagtcgccgtgcctacca

SEQ ID NO: 278781 - DNA, 25 bp, probe
tcgagagaagatcaccctccttcga

SEQ ID NO: 278782 - DNA, 25 bp, probe
tcgagagaagatcaccctccttcga

SEQ ID NO: 278783 - DNA, 25 bp, probe
tcgaagcaggaattccccacttttg

SEQ ID NO: 278784 - DNA, 25 bp, probe
tcgaagcaggaattccccacttttg

SEQ ID NO: 278785 - DNA, 25 bp, probe
tcgtagggtgaagcccacgttttct

SEQ ID NO: 278786 - DNA, 25 bp, probe
tctgtagaagtgatcctcacccttt

SEQ ID NO: 278787 - DNA, 25 bp, probe
tctgtaatacagtttctacgtctat

SEQ ID NO: 278788 - DNA, 25 bp, probe
tctgtagtaacttttgagattctct

SEQ ID NO: 278789 - DNA, 25 bp, probe
tctgtagtaacttttgagattctct

SEQ ID NO: 278790 - DNA, 25 bp, probe
tcgtaccaatcatcttgggacagcc

SEQ ID NO: 278791 - DNA, 25 bp, probe
tcgtcaacgacatcttcgaacgcat

SEQ ID NO: 278792 - DNA, 25 bp, probe
tcgtgaaggagttctcccacatcgc

SEQ ID NO: 278793 - DNA, 25 bp, probe
tcgtatggggtgacaccgcctagcc

SEQ ID NO: 278794 - DNA, 25 bp, probe
tctgtatggctaggaccaccctact

SEQ ID NO: 278795 - DNA, 25 bp, probe
tctgtaactatggacttaccttcac

SEQ ID NO: 278796 - DNA, 25 bp, probe
tcggttcattcgatgagacctgtac

SEQ ID NO: 278797 - DNA, 25 bp, probe
tcggtttcacaaatggcagacttga

SEQ ID NO: 278798 - DNA, 25 bp, probe
tcgcccctgaagttgtgaactatga

SEQ ID NO: 278799 - DNA, 25 bp, probe
tcgcctggtcaatgctctaagtgaa

SEQ ID NO: 278800 - DNA, 25 bp, probe
tcgcctgaccattacacgcaaagat

SEQ ID NO: 278801 - DNA, 25 bp, probe
tcgtctgacctatttccttcagtta

SEQ ID NO: 278802 - DNA, 25 bp, probe
tagtctgaaaactcccctgggaact

SEQ ID NO: 278803 - DNA, 25 bp, probe
tatgttggaaactcaagtggaagga

SEQ ID NO: 278804 - DNA, 25 bp, probe
tcgcttggtttcccaggtggaatgg

SEQ ID NO: 278805 - DNA, 25 bp, probe
tcgtgggctatatctgcggtgaaag

SEQ ID NO: 278806 - DNA, 25 bp, probe
tcggggtgacactgtgggaaatgtt

SEQ ID NO: 278807 - DNA, 25 bp, probe
tcgggaaggcatttgtgggaagaaa

SEQ ID NO: 278808 - DNA, 25 bp, probe
tcgggagccagatggtctgagaagt

SEQ ID NO: 278809 - DNA, 25 bp, probe
tctgaggagccgcgagtactgggac

SEQ ID NO: 278810 - DNA, 25 bp, probe
tcgatggcaaagacggcccgtggtc

SEQ ID NO: 278811 - DNA, 25 bp, probe
tcgatggcaaacggaagcctgtgac

SEQ ID NO: 278812 - DNA, 25 bp, probe
tcgacagaagattcggagccttgat

SEQ ID NO: 278813 - DNA, 25 bp, probe
tcggatgaagaaggcgacccggttc

SEQ ID NO: 278814 - DNA, 25 bp, probe
tcggggtaatgaccacaccgacttc

SEQ ID NO: 278815 - DNA, 25 bp, probe
tcgcgcggatcatgatgccaacctc

SEQ ID NO: 278816 - DNA, 25 bp, probe
tcgcgatggacagactcacaacctg

SEQ ID NO: 278817 - DNA, 25 bp, probe
tctggatcccaaacttcatactccc

SEQ ID NO: 278818 - DNA, 25 bp, probe
tcggataccacaagtgctttcccaa

SEQ ID NO: 278819 - DNA, 25 bp, probe
tcggaagtggaaacttctcccaagt

SEQ ID NO: 278820 - DNA, 25 bp, probe
tcgtgaaggaaaagcactacctcac

SEQ ID NO: 278821 - DNA, 25 bp, probe
tcgatgacaatgagtatgcctacct

SEQ ID NO: 278822 - DNA, 25 bp, probe
tcgaacatatgcagttattccacta

SEQ ID NO: 278823 - DNA, 25 bp, probe
tcggcatcgagaagtacatcccgta

SEQ ID NO: 278824 - DNA, 25 bp, probe
tctggatcaggtctaccattgcttg

SEQ ID NO: 278825 - DNA, 25 bp, probe
tctggaaggctaacccttgttggga

SEQ ID NO: 278826 - DNA, 25 bp, probe
tctgaggggctattaccaagggtta

SEQ ID NO: 278827 - DNA, 25 bp, probe
tctgtggggccataaacctatttag

SEQ ID NO: 278828 - DNA, 25 bp, probe
tttgatgtgggctgtaacctctttg

SEQ ID NO: 278829 - DNA, 25 bp, probe
tttgatgtgggctgtaacctctttg

SEQ ID NO: 278830 - DNA, 25 bp, probe
tctagttgttcagtgtaaccttttt

SEQ ID NO: 278831 - DNA, 25 bp, probe
tcggttagtcattgatagaactact

SEQ ID NO: 278832 - DNA, 25 bp, probe
tcgccaataggcggacgagagtttg

SEQ ID NO: 278833 - DNA, 25 bp, probe
tcgccaagtggaccatcgatgaggt

SEQ ID NO: 278834 - DNA, 25 bp, probe
tcgtgaggtggactcctcagaggac

SEQ ID NO: 278835 - DNA, 25 bp, probe
tcgagacgggcatctttggcgagct

SEQ ID NO: 278836 - DNA, 25 bp, probe
tcgagacgggcatctttggcgagct

SEQ ID NO: 278837 - DNA, 25 bp, probe
tctggaaaagcatcttcctgtggct

SEQ ID NO: 278838 - DNA, 25 bp, probe
tctggaaaagcatcttcctgtggct

SEQ ID NO: 278839 - DNA, 25 bp, probe
tcggaaaccctttttgtggcatgta

SEQ ID NO: 278840 - DNA, 25 bp, probe
tcggaaaccctttttgtggcatgta

SEQ ID NO: 278841 - DNA, 25 bp, probe
tcccaaaccagctattcttttcatt

SEQ ID NO: 278842 - DNA, 25 bp, probe
tcccaaactcatggaagtctgtttt

SEQ ID NO: 278843 - DNA, 25 bp, probe
tcccaaaccaagtgccttgagctgc

SEQ ID NO: 278844 - DNA, 25 bp, probe
tctccaaagcactgggtgccgacga

SEQ ID NO: 278845 - DNA, 25 bp, probe
tcgccagtcaactacgcgaggcaga

SEQ ID NO: 278846 - DNA, 25 bp, probe
tcgccagaaagactccaggggactc

SEQ ID NO: 278847 - DNA, 25 bp, probe
tcgaccatcacctccagggagatcc

SEQ ID NO: 278848 - DNA, 25 bp, probe
tcgactgcatcacgcagggacgtga

SEQ ID NO: 278849 - DNA, 25 bp, probe
tcgagtctacaatctatgcagtgaa

SEQ ID NO: 278850 - DNA, 25 bp, probe
tcgtgatcatcgttcaatacttgaa

SEQ ID NO: 278851 - DNA, 25 bp, probe
tcgtgatcatcgttcaatacttgaa

SEQ ID NO: 278852 - DNA, 25 bp, probe
tcggacaagtacttcgacgaacact

SEQ ID NO: 278853 - DNA, 25 bp, probe
tcgctccagagatcctccaggaaat

SEQ ID NO: 278854 - DNA, 25 bp, probe
tcgctgtcaggatcatgccctgtgg

SEQ ID NO: 278855 - DNA, 25 bp, probe
tcgctgctgacgtgatctatctttg

SEQ ID NO: 278856 - DNA, 25 bp, probe
tcgtgcgcatcttgcgcatctttaa

SEQ ID NO: 278857 - DNA, 25 bp, probe
tcgggatcatgagtttgttgacatc

SEQ ID NO: 278858 - DNA, 25 bp, probe
tcgcaggagcatgcgtctactgcct

SEQ ID NO: 278859 - DNA, 25 bp, probe
tctggctgagatgctctctaaccgg

SEQ ID NO: 278860 - DNA, 25 bp, probe
tcggtgccacgcatcttcatgaagg

SEQ ID NO: 278861 - DNA, 25 bp, probe
tcgggccagtgaccatgacggggcc

SEQ ID NO: 278862 - DNA, 25 bp, probe
tcggttcaggaggagacagtcagga

SEQ ID NO: 278863 - DNA, 25 bp, probe
tcggtatgggatgcagaactctggc

SEQ ID NO: 278864 - DNA, 25 bp, probe
tcggtatgggatgcagaactctggc

SEQ ID NO: 278865 - DNA, 25 bp, probe
tctggggactaccagagactctggg

SEQ ID NO: 278866 - DNA, 25 bp, probe
tcgtgagaactgcaaaccgctgcgg

SEQ ID NO: 278867 - DNA, 25 bp, probe
tcgggaaatgagaagacggctcggt

SEQ ID NO: 278868 - DNA, 25 bp, probe
tcgggaaatgcaggaaggccgggtt

SEQ ID NO: 278869 - DNA, 25 bp, probe
tcggcgtatacctaaggagagtttt

SEQ ID NO: 278870 - DNA, 25 bp, probe
tcgtctgagtcagctaagagcgagt

SEQ ID NO: 278871 - DNA, 25 bp, probe
tcgttggccatcctgcagaagcaac

SEQ ID NO: 278872 - DNA, 25 bp, probe
tcgttgctgtcggtggaagataacc

SEQ ID NO: 278873 - DNA, 25 bp, probe
tcgtcctgatccggctgaagaagaa

SEQ ID NO: 278874 - DNA, 25 bp, probe
tcgtctgaatcatccgaggcaaaga

SEQ ID NO: 278875 - DNA, 25 bp, probe
tcgacttcattggccaagtgcataa

SEQ ID NO: 278876 - DNA, 25 bp, probe
tctgcagttactttgaagacatcaa

SEQ ID NO: 278877 - DNA, 25 bp, probe
tctgcagttactttgaagacatcaa

SEQ ID NO: 278878 - DNA, 25 bp, probe
tcgatgcatttttatagaaacactt

SEQ ID NO: 278879 - DNA, 25 bp, probe
tcgtcttgtttctagcaaaacaggt

SEQ ID NO: 278880 - DNA, 25 bp, probe
tcgattacttcctacaggagcacgg

SEQ ID NO: 278881 - DNA, 25 bp, probe
tcgagtgatcttgccccagaccggc

SEQ ID NO: 278882 - DNA, 25 bp, probe
tcaagctggttgtccactaaacccc

SEQ ID NO: 278883 - DNA, 25 bp, probe
tcaagctggttgtccactaaacccc

SEQ ID NO: 278884 - DNA, 25 bp, probe
tcattctggggttcctggtacccct

SEQ ID NO: 278885 - DNA, 25 bp, probe
tcaacggggttcgatttaagcggat

SEQ ID NO: 278886 - DNA, 25 bp, probe
tcaacggggttcgatttaagcggat

SEQ ID NO: 278887 - DNA, 25 bp, probe
tcttctggaggttctatttacgggt

SEQ ID NO: 278888 - DNA, 25 bp, probe
tcgtggtgggatttacctacttggt

SEQ ID NO: 278889 - DNA, 25 bp, probe
tcgtggtgggatttacctacttggt

SEQ ID NO: 278890 - DNA, 25 bp, probe
tctgtggtagagacagctacttact

SEQ ID NO: 278891 - DNA, 25 bp, probe
tcgccgtcagagtgctgtcttatgt

SEQ ID NO: 278892 - DNA, 25 bp, probe
tcgcctgtcagttgagtgtcggcgc

SEQ ID NO: 278893 - DNA, 25 bp, probe
tcgctcagctttcggatgcgggagc

SEQ ID NO: 278894 - DNA, 25 bp, probe
tcgctcagctttcggatgcgggagc

SEQ ID NO: 278895 - DNA, 25 bp, probe
tcgccatctattgcgtggtgggcag

SEQ ID NO: 278896 - DNA, 25 bp, probe
tcgcccagttgtgtgtgtggggatg

SEQ ID NO: 278897 - DNA, 25 bp, probe
tctcagaaggtgtttggtatgggaa

SEQ ID NO: 278898 - DNA, 25 bp, probe
tctggaaggcagtctttctatagaa

SEQ ID NO: 278899 - DNA, 25 bp, probe
tctggaactactttatctacggatt

SEQ ID NO: 278900 - DNA, 25 bp, probe
tcgggactatcattcgaaacgaagt

SEQ ID NO: 278901 - DNA, 25 bp, probe
tcggcgcgcaaagcgaaagcggcag

SEQ ID NO: 278902 - DNA, 25 bp, probe
tctgggttaacatcaaagctggcaa

SEQ ID NO: 278903 - DNA, 25 bp, probe
tcgcggccgaggtccagaagggaag

SEQ ID NO: 278904 - DNA, 25 bp, probe
tctggggcggcataatgaagggtga

SEQ ID NO: 278905 - DNA, 25 bp, probe
tctgggtcctgtgcaagggctggaa

SEQ ID NO: 278906 - DNA, 25 bp, probe
tctgggtcctgtgcaagggctggaa

SEQ ID NO: 278907 - DNA, 25 bp, probe
tcgtgaaaagcttaatgggctggcc

SEQ ID NO: 278908 - DNA, 25 bp, probe
tcgtgctaaattttcagtaggccta

SEQ ID NO: 278909 - DNA, 25 bp, probe
tcgcgccaaattttgcgctcggtgc

SEQ ID NO: 278910 - DNA, 25 bp, probe
tcgccgccaatgcttgttcaggcac

SEQ ID NO: 278911 - DNA, 25 bp, probe
tcgcctgccatggggcgaggaggcc

SEQ ID NO: 278912 - DNA, 25 bp, probe
tcgccagtcactgctgcaaggtggc

SEQ ID NO: 278913 - DNA, 25 bp, probe
tcgccagtcactgctgcaaggtggc

SEQ ID NO: 278914 - DNA, 25 bp, probe
tcgcctccagctacgaagagtgccg

SEQ ID NO: 278915 - DNA, 25 bp, probe
tcgctctgtcaccaggctggagtgc

SEQ ID NO: 278916 - DNA, 25 bp, probe
tcgccagtcagacgtctggagcttc

SEQ ID NO: 278917 - DNA, 25 bp, probe
tcgcaaagaactactgggcatgtgc

SEQ ID NO: 278918 - DNA, 25 bp, probe
tcgcaagaacctgatggacatgttc

SEQ ID NO: 278919 - DNA, 25 bp, probe
tcgaggagccctttgaactttccaa

SEQ ID NO: 278920 - DNA, 25 bp, probe
tcgtgaaggcttttgttctttctcc

SEQ ID NO: 278921 - DNA, 25 bp, probe
tctgggaggattttttggttgccta

SEQ ID NO: 278922 - DNA, 25 bp, probe
tctcgggaatgttttgtctgttgcc

SEQ ID NO: 278923 - DNA, 25 bp, probe
ttgggagacgggtcttctgacctca

SEQ ID NO: 278924 - DNA, 25 bp, probe
ttgggagacgggtcttctgacctca

SEQ ID NO: 278925 - DNA, 25 bp, probe
tcggggggtggaatttgatgacaaa

SEQ ID NO: 278926 - DNA, 25 bp, probe
tcggggggtggaatttgatgacaaa

SEQ ID NO: 278927 - DNA, 25 bp, probe
tcggaggagatgctcacttcgatga

SEQ ID NO: 278928 - DNA, 25 bp, probe
tcggagtgatttaccactgcacaga

SEQ ID NO: 278929 - DNA, 25 bp, probe
tcgtggtggtgatcgcaggcacagc

SEQ ID NO: 278930 - DNA, 25 bp, probe
tcgctgtgtggtatctgaggctggc

SEQ ID NO: 278931 - DNA, 25 bp, probe
tcgtggaggtgactatggttggccc

SEQ ID NO: 278932 - DNA, 25 bp, probe
tcgtgggttgaattgtgtcccccat

SEQ ID NO: 278933 - DNA, 25 bp, probe
tctgggttgaagctggtcacaccaa

SEQ ID NO: 278934 - DNA, 25 bp, probe
tctgacggaaaacctgtaccctgat

SEQ ID NO: 278935 - DNA, 25 bp, probe
tctgagggaaaatctgaccataaga

SEQ ID NO: 278936 - DNA, 25 bp, probe
tcgagagctgcatgaatgaggacca

SEQ ID NO: 278937 - DNA, 25 bp, probe
tcgatctctgagttatggtgctata

SEQ ID NO: 278938 - DNA, 25 bp, probe
tcggcatcatgagaaggctgcttcg

SEQ ID NO: 278939 - DNA, 25 bp, probe
tcgtcatgtgggaagtcatgtcatt

SEQ ID NO: 278940 - DNA, 25 bp, probe
tcgctctctagacatgtggtctgtt

SEQ ID NO: 278941 - DNA, 25 bp, probe
tcacctcggacatggcgtatgtcat

SEQ ID NO: 278942 - DNA, 25 bp, probe
tcgcctcaggatgagctggatttcc

SEQ ID NO: 278943 - DNA, 25 bp, probe
tcgcccaggctggagtgcagtggtg

SEQ ID NO: 278944 - DNA, 25 bp, probe
tcggtcagtgctgggcggagactgt

SEQ ID NO: 278945 - DNA, 25 bp, probe
tcggtgctgcagatggccaagacgc

SEQ ID NO: 278946 - DNA, 25 bp, probe
tcggtgcactgatcgctgccaatgc

SEQ ID NO: 278947 - DNA, 25 bp, probe
tcgccgcacatcatcagcgcgcaag

SEQ ID NO: 278948 - DNA, 25 bp, probe
tcgcccagcgcaacgtggaaggtgg

SEQ ID NO: 278949 - DNA, 25 bp, probe
tcgcccagcgcaacgtggaaggtgg

SEQ ID NO: 278950 - DNA, 25 bp, probe
tcgccctcagcatgtgggaagggac

SEQ ID NO: 278951 - DNA, 25 bp, probe
tcgacgctacattgatgagtacaga

SEQ ID NO: 278952 - DNA, 25 bp, probe
tcgactgcatgctacagggttcaga

SEQ ID NO: 278953 - DNA, 25 bp, probe
tcgacagctgattggcggattggag

SEQ ID NO: 278954 - DNA, 25 bp, probe
tcgagaccttgactgttttgaggct

SEQ ID NO: 278955 - DNA, 25 bp, probe
tcgaagtttaggtttatgagtatat

SEQ ID NO: 278956 - DNA, 25 bp, probe
tcgagattttggaattcgtgcagga

SEQ ID NO: 278957 - DNA, 25 bp, probe
tcgcgatttagaagttgtggaggga

SEQ ID NO: 278958 - DNA, 25 bp, probe
tcaggatgattacatgggccagggc

SEQ ID NO: 278959 - DNA, 25 bp, probe
tcggcctaatcatttgggagatggc

SEQ ID NO: 278960 - DNA, 25 bp, probe
tcgcagattttcttgggagagtcac

SEQ ID NO: 278961 - DNA, 25 bp, probe
tcgagaggttcagtgggagaggccc

SEQ ID NO: 278962 - DNA, 25 bp, probe
tcgagaggttcagtgggagaggccc

SEQ ID NO: 278963 - DNA, 25 bp, probe
tcggggcctgcaagggcaatggcga

SEQ ID NO: 278964 - DNA, 25 bp, probe
tcggggcaggtgagcaggatgccga

SEQ ID NO: 278965 - DNA, 25 bp, probe
tcgtggggagttccaggacttgctt

SEQ ID NO: 278966 - DNA, 25 bp, probe
ttgtgccgtagtgaccaggcctttt

SEQ ID NO: 278967 - DNA, 25 bp, probe
ttgtgccgtagtgaccaggcctttt

SEQ ID NO: 278968 - DNA, 25 bp, probe
tcggccggagatgagccgaggcttg

SEQ ID NO: 278969 - DNA, 25 bp, probe
tctggccggacagaactggtgctct

SEQ ID NO: 278970 - DNA, 25 bp, probe
tctggccggacagaactggtgctct

SEQ ID NO: 278971 - DNA, 25 bp, probe
tctggccggacagaactggtgctct

SEQ ID NO: 278972 - DNA, 25 bp, probe
tctggttaagccgacactggacctt

SEQ ID NO: 278973 - DNA, 25 bp, probe
tcgtgttacagtcacaatctacttt

SEQ ID NO: 278974 - DNA, 25 bp, probe
tctgtttacgtaacctgcttagtat

SEQ ID NO: 278975 - DNA, 25 bp, probe
tcgtgagtaggaaccctgtctcagt

SEQ ID NO: 278976 - DNA, 25 bp, probe
tcgagtgagaggttccgggcagcag

SEQ ID NO: 278977 - DNA, 25 bp, probe
tcgagtgagaggttccgggcagcag

SEQ ID NO: 278978 - DNA, 25 bp, probe
tcgagtttgtggtgcgtggcaaccc

SEQ ID NO: 278979 - DNA, 25 bp, probe
tcgcaggggggcttgctgtggaagt

SEQ ID NO: 278980 - DNA, 25 bp, probe
tcgtggcattgggtctgggatgaag

SEQ ID NO: 278981 - DNA, 25 bp, probe
tcgggcgtgacttcattggccagag

SEQ ID NO: 278982 - DNA, 25 bp, probe
tcgtgtggtacgtcacatcccagag

SEQ ID NO: 278983 - DNA, 25 bp, probe
tcgagtgagagctgacctgcaccga

SEQ ID NO: 278984 - DNA, 25 bp, probe
tcgatgatgaatttaccgcccagtc

SEQ ID NO: 278985 - DNA, 25 bp, probe
tcgatgatgaatttaccgcccagtc

SEQ ID NO: 278986 - DNA, 25 bp, probe
tcgatgatgaatttaccgcccagtc

SEQ ID NO: 278987 - DNA, 25 bp, probe
tcgtgtacctgttcatcggcacgtc

SEQ ID NO: 278988 - DNA, 25 bp, probe
tctggcagtgcaggcattactaaaa

SEQ ID NO: 278989 - DNA, 25 bp, probe
tctggatggccacctacaacaagca

SEQ ID NO: 278990 - DNA, 25 bp, probe
tctggtcgcctgggaaacaagccct

SEQ ID NO: 278991 - DNA, 25 bp, probe
tcggggagctgctgactcagaagcc

SEQ ID NO: 278992 - DNA, 25 bp, probe
tctgggaacgcatcctgagaggcca

SEQ ID NO: 278993 - DNA, 25 bp, probe
tcgggaaccatttgtgcaacgacag

SEQ ID NO: 278994 - DNA, 25 bp, probe
tcgcgggactcacgaggcaacaaca

SEQ ID NO: 278995 - DNA, 25 bp, probe
tcgcgggactcacgaggcaacaaca

SEQ ID NO: 278996 - DNA, 25 bp, probe
tcgtgggccgcagcaggaagcaaag

SEQ ID NO: 278997 - DNA, 25 bp, probe
tcgtggaggtgcgcagtggactcac

SEQ ID NO: 278998 - DNA, 25 bp, probe
tcgtggaggtgcgcagtggactcac

SEQ ID NO: 278999 - DNA, 25 bp, probe
tcgagaagggcatgggcgattcctg

SEQ ID NO: 279000 - DNA, 25 bp, probe
tctggagagggttggatgcgtcccc

SEQ ID NO: 279001 - DNA, 25 bp, probe
tctggcgggcaggcagagacgctgc

SEQ ID NO: 279002 - DNA, 25 bp, probe
tcgctgcgggagggtgacgtggtga

SEQ ID NO: 279003 - DNA, 25 bp, probe
tcgctgcgggagggtgacgtggtga

SEQ ID NO: 279004 - DNA, 25 bp, probe
tcgctgcgggagggtgacgtggtga

SEQ ID NO: 279005 - DNA, 25 bp, probe
tctctgctgaaggttgtaagtggtc

SEQ ID NO: 279006 - DNA, 25 bp, probe
tcgagagaacaaatggaggtggtga

SEQ ID NO: 279007 - DNA, 25 bp, probe
tcgagagaacaaatggaggtggtga

SEQ ID NO: 279008 - DNA, 25 bp, probe
tcgacagcagattatctccaggtgg

SEQ ID NO: 279009 - DNA, 25 bp, probe
tcgacaacttcttccaggtgcagga

SEQ ID NO: 279010 - DNA, 25 bp, probe
tcgacagcctcctggagttggtgga

SEQ ID NO: 279011 - DNA, 25 bp, probe
tcgacagcctcctggagttggtgga

SEQ ID NO: 279012 - DNA, 25 bp, probe
tcgacccaacatgagcatcgtggtg

SEQ ID NO: 279013 - DNA, 25 bp, probe
tcgacccaacatgagcatcgtggtg

SEQ ID NO: 279014 - DNA, 25 bp, probe
tcgttccagacatgagcttgagcag

SEQ ID NO: 279015 - DNA, 25 bp, probe
tcgacacggagcagatgctgtccgc

SEQ ID NO: 279016 - DNA, 25 bp, probe
tcgacagggagcctgtccaccagca

SEQ ID NO: 279017 - DNA, 25 bp, probe
tcgaggcagaggtcatgttcccagc

SEQ ID NO: 279018 - DNA, 25 bp, probe
tcgaggcagaggtcatgttcccagc

SEQ ID NO: 279019 - DNA, 25 bp, probe
tcgagaggaggccagatgtcccgga

SEQ ID NO: 279020 - DNA, 25 bp, probe
tagaacgggcatctactccagtact

SEQ ID NO: 279021 - DNA, 25 bp, probe
tcgaatctgggtgtttcaaagacat

SEQ ID NO: 279022 - DNA, 25 bp, probe
tctgaagtggttatttactcaaatc

SEQ ID NO: 279023 - DNA, 25 bp, probe
tcgaaggagtgcttttccaccaaat

SEQ ID NO: 279024 - DNA, 25 bp, probe
tcgacatctaacgttttatcataaa

SEQ ID NO: 279025 - DNA, 25 bp, probe
tcgacattaacccactcatttagta

SEQ ID NO: 279026 - DNA, 25 bp, probe
tcgacaggtacgtcaccatctttta

SEQ ID NO: 279027 - DNA, 25 bp, probe
tcgagcacaagctggacctgctgtt

SEQ ID NO: 279028 - DNA, 25 bp, probe
tcgacatgaagcgggccctgatgat

SEQ ID NO: 279029 - DNA, 25 bp, probe
tcgacatgaagcgggccctgatgat

SEQ ID NO: 279030 - DNA, 25 bp, probe
tcggcatgaagatgtccacaagaaa

SEQ ID NO: 279031 - DNA, 25 bp, probe
tcggcatgaagatgtccacaagaaa

SEQ ID NO: 279032 - DNA, 25 bp, probe
tctgcctgaaaagtcccaaggagaa

SEQ ID NO: 279033 - DNA, 25 bp, probe
tcgcttggaggagcagtcaaagaca

SEQ ID NO: 279034 - DNA, 25 bp, probe
tcgctatgttggaaatgtgcaacca

SEQ ID NO: 279035 - DNA, 25 bp, probe
tcgacaggtggaacatgttaccatc

SEQ ID NO: 279036 - DNA, 25 bp, probe
tcgaagagcatgtgaagttacaatg

SEQ ID NO: 279037 - DNA, 25 bp, probe
tcggaactgaggccatgattaagag

SEQ ID NO: 279038 - DNA, 25 bp, probe
tcggaactgaggccatgattaagag

SEQ ID NO: 279039 - DNA, 25 bp, probe
tcggacaatcgaccgaaagcaagag

SEQ ID NO: 279040 - DNA, 25 bp, probe
tcggaacttaccccgagaatgactg

SEQ ID NO: 279041 - DNA, 25 bp, probe
tcaggactttaccccaaaagccgtg

SEQ ID NO: 279042 - DNA, 25 bp, probe
ttggttttagatgccacaaagcggt

SEQ ID NO: 279043 - DNA, 25 bp, probe
tctggttaaacagcttgcttaccgt

SEQ ID NO: 279044 - DNA, 25 bp, probe
tctgtgctctgatcacagccttgct

SEQ ID NO: 279045 - DNA, 25 bp, probe
tcgacctgatgcagagccttctgag

SEQ ID NO: 279046 - DNA, 25 bp, probe
tcgtctcaatcaggaggtgtctcag

SEQ ID NO: 279047 - DNA, 25 bp, probe
tcgttcactcatggaaaatagcgat

SEQ ID NO: 279048 - DNA, 25 bp, probe
tctgttcattgaggcttccaactga

SEQ ID NO: 279049 - DNA, 25 bp, probe
tcgggatggtcgatcacaactgggg

SEQ ID NO: 279050 - DNA, 25 bp, probe
tcgggcaggggagaacattccggga

SEQ ID NO: 279051 - DNA, 25 bp, probe
tcggtggggagggacaggtgccctg

SEQ ID NO: 279052 - DNA, 25 bp, probe
tcgagcggggagggtaatgtgcacc

SEQ ID NO: 279053 - DNA, 25 bp, probe
tctggggtacagcgtagatgtgaaa

SEQ ID NO: 279054 - DNA, 25 bp, probe
tcggagggcaactagcatggatctg

SEQ ID NO: 279055 - DNA, 25 bp, probe
tcgtcatggtgacccagtgtgttga

SEQ ID NO: 279056 - DNA, 25 bp, probe
tcgacattggaaatcacttctgtga

SEQ ID NO: 279057 - DNA, 25 bp, probe
tcgatctctgggatttatgctcatg

SEQ ID NO: 279058 - DNA, 25 bp, probe
tcgtcctcaggttcttgaccatgaa

SEQ ID NO: 279059 - DNA, 25 bp, probe
tcgtcctcaggttcttgaccatgaa

SEQ ID NO: 279060 - DNA, 25 bp, probe
tcgtcctgtggtgcgtgcatggaga

SEQ ID NO: 279061 - DNA, 25 bp, probe
tcgtccgtggtcatgtgcatgggca

SEQ ID NO: 279062 - DNA, 25 bp, probe
tcgtccgtgacgacatgctgtgtgc

SEQ ID NO: 279063 - DNA, 25 bp, probe
tcgtccaggacgtctgagtagcagg

SEQ ID NO: 279064 - DNA, 25 bp, probe
tcgtcacggagtacatgagcaaggg

SEQ ID NO: 279065 - DNA, 25 bp, probe
tcgtgacttgaacagactgagcgtg

SEQ ID NO: 279066 - DNA, 25 bp, probe
tcgatacttacacaaggagaagagg

SEQ ID NO: 279067 - DNA, 25 bp, probe
tcggcaatggaacctacggacaggt

SEQ ID NO: 279068 - DNA, 25 bp, probe
tctggcatctggtaggcatcacgag

SEQ ID NO: 279069 - DNA, 25 bp, probe
tctggcatctggtaggcatcacgag

SEQ ID NO: 279070 - DNA, 25 bp, probe
tctggtcacagcgacccaggatgct

SEQ ID NO: 279071 - DNA, 25 bp, probe
tcggtgacctacactgtcatcactc

SEQ ID NO: 279072 - DNA, 25 bp, probe
tcggtgatgcacaccatggtcaccc

SEQ ID NO: 279073 - DNA, 25 bp, probe
tcgaggtgcaccgagtgggcaactc

SEQ ID NO: 279074 - DNA, 25 bp, probe
tcgagtccatccgtgtggacacgcc

SEQ ID NO: 279075 - DNA, 25 bp, probe
tcgggctacacggagaagcagcgcc

SEQ ID NO: 279076 - DNA, 25 bp, probe
tcgtcatccacagggacaacaccac

SEQ ID NO: 279077 - DNA, 25 bp, probe
tctgtccttcagggactgaagaact

SEQ ID NO: 279078 - DNA, 25 bp, probe
tcgatacaccgggcctggagaacta

SEQ ID NO: 279079 - DNA, 25 bp, probe
tcgtcctccggagccaggagagtga

SEQ ID NO: 279080 - DNA, 25 bp, probe
tcgtggacccacgcaaggacagtga

SEQ ID NO: 279081 - DNA, 25 bp, probe
tcgtggaccaagccctgagagaagc

SEQ ID NO: 279082 - DNA, 25 bp, probe
tcgggagatcaactgggaggaactt

SEQ ID NO: 279083 - DNA, 25 bp, probe
tcggaggtgatcctggcagaagata

SEQ ID NO: 279084 - DNA, 25 bp, probe
tcgtgctgccacatgttcaaagtac

SEQ ID NO: 279085 - DNA, 25 bp, probe
tcgactgctccaagaatcagagaat

SEQ ID NO: 279086 - DNA, 25 bp, probe
tcgactcctgtgccaatcaggcagc

SEQ ID NO: 279087 - DNA, 25 bp, probe
tctgacctgctttgcagacgtgcct

SEQ ID NO: 279088 - DNA, 25 bp, probe
tcgactatgccttagacacatcctc

SEQ ID NO: 279089 - DNA, 25 bp, probe
tcgactatgccttagacacatcctc

SEQ ID NO: 279090 - DNA, 25 bp, probe
tcgagctcagacagggactcagcct

SEQ ID NO: 279091 - DNA, 25 bp, probe
tctggatcgacacgggcatccattc

SEQ ID NO: 279092 - DNA, 25 bp, probe
tcggccgaagccatcggcatcatga

SEQ ID NO: 279093 - DNA, 25 bp, probe
tcggccgacaacgtcactgtgatgg

SEQ ID NO: 279094 - DNA, 25 bp, probe
tcggttattgtcatccattgtggaa

SEQ ID NO: 279095 - DNA, 25 bp, probe
tcggttacggcatagcctatgtaca

SEQ ID NO: 279096 - DNA, 25 bp, probe
tctgcctaattgtcaaggcctcctt

SEQ ID NO: 279097 - DNA, 25 bp, probe
tctaatggaatgtcctggctccacc

SEQ ID NO: 279098 - DNA, 25 bp, probe
tctaaggaagacttatctcctgcct

SEQ ID NO: 279099 - DNA, 25 bp, probe
tctgaagaaatgtccaattttttgg

SEQ ID NO: 279100 - DNA, 25 bp, probe
tctggcaaaatggcactgaatcatc

SEQ ID NO: 279101 - DNA, 25 bp, probe
tctggcaggaactctgatgcaccgc

SEQ ID NO: 279102 - DNA, 25 bp, probe
tcggcagaacattcctgcttccgag

SEQ ID NO: 279103 - DNA, 25 bp, probe
tcggacgacatcttctgtaccagag

SEQ ID NO: 279104 - DNA, 25 bp, probe
tctggaccactccatatttaggacc

SEQ ID NO: 279105 - DNA, 25 bp, probe
tctggccacactcaactttgtacat

SEQ ID NO: 279106 - DNA, 25 bp, probe
tctggccacacgaaactgtttagtg

SEQ ID NO: 279107 - DNA, 25 bp, probe
tctggcgcaagagaacatttctaga

SEQ ID NO: 279108 - DNA, 25 bp, probe
tctccagcaaaccagtatttaacca

SEQ ID NO: 279109 - DNA, 25 bp, probe
tctgtaaatatctgtatctaaacca

SEQ ID NO: 279110 - DNA, 25 bp, probe
tctgtaaatatctgtatctaaacca

SEQ ID NO: 279111 - DNA, 25 bp, probe
tcggaagattctctgtatcaaacaa

SEQ ID NO: 279112 - DNA, 25 bp, probe
tctggaacaagacagttcgcaaaga

SEQ ID NO: 279113 - DNA, 25 bp, probe
tctccaactcggaagtaagcccaag

SEQ ID NO: 279114 - DNA, 25 bp, probe
tcgtcacctgggagacagtccagaa

SEQ ID NO: 279115 - DNA, 25 bp, probe
tcggccctcagagaaggatccagaa

SEQ ID NO: 279116 - DNA, 25 bp, probe
tcggacctagaggaggcctccgagc

SEQ ID NO: 279117 - DNA, 25 bp, probe
tctgtacctggggaggctatctctg

SEQ ID NO: 279118 - DNA, 25 bp, probe
tcgtatatctgttctcggtactata

SEQ ID NO: 279119 - DNA, 25 bp, probe
tctatagtttttcaggatcttaaaa

SEQ ID NO: 279120 - DNA, 25 bp, probe
tctggttttttggaggtctgtctga

SEQ ID NO: 279121 - DNA, 25 bp, probe
tctcgtggttgctcgactgttgtat

SEQ ID NO: 279122 - DNA, 25 bp, probe
tcgagctctatttttactgtctggt

SEQ ID NO: 279123 - DNA, 25 bp, probe
tcgagctctatttttactgtctggt

SEQ ID NO: 279124 - DNA, 25 bp, probe
tcgagctattattcttacaccctgt

SEQ ID NO: 279125 - DNA, 25 bp, probe
tcggctcttgacacttagccgctgt

SEQ ID NO: 279126 - DNA, 25 bp, probe
tctggcttaagtccttagctgcggt

SEQ ID NO: 279127 - DNA, 25 bp, probe
tcgtcttcaaggacctgagcgggtg

SEQ ID NO: 279128 - DNA, 25 bp, probe
tcgtcttcaaggacctgagcgggtg

SEQ ID NO: 279129 - DNA, 25 bp, probe
tcgactctcaaatactggcagtggt

SEQ ID NO: 279130 - DNA, 25 bp, probe
tctaccatgaaatcctggccatggg

SEQ ID NO: 279131 - DNA, 25 bp, probe
tcgtcacggaactcatgcgcaaggg

SEQ ID NO: 279132 - DNA, 25 bp, probe
tctgaaggagtacaccatcaagtcg

SEQ ID NO: 279133 - DNA, 25 bp, probe
tctggggttctggaccaagttcgac

SEQ ID NO: 279134 - DNA, 25 bp, probe
tctggggttctggaccaagttcgac

SEQ ID NO: 279135 - DNA, 25 bp, probe
tctccagggtctgcccaaggaagtt

SEQ ID NO: 279136 - DNA, 25 bp, probe
tctccaggggcatcccttggaggca

SEQ ID NO: 279137 - DNA, 25 bp, probe
tctctctagttgaaccctgggaaca

SEQ ID NO: 279138 - DNA, 25 bp, probe
tctcaggctcttgactacttggaac

SEQ ID NO: 279139 - DNA, 25 bp, probe
tctgcagagtttgttgactttacct

SEQ ID NO: 279140 - DNA, 25 bp, probe
tctgggtttgtttacagcaattcct

SEQ ID NO: 279141 - DNA, 25 bp, probe
tctgctgagtttcttatcagccctc

SEQ ID NO: 279142 - DNA, 25 bp, probe
tctggatttttactacaggcccttc

SEQ ID NO: 279143 - DNA, 25 bp, probe
tcggtcctctgaacacagagtccct

SEQ ID NO: 279144 - DNA, 25 bp, probe
tcggcctctctaagaagatttacag

SEQ ID NO: 279145 - DNA, 25 bp, probe
tcggcgttatctggaaagtggactg

SEQ ID NO: 279146 - DNA, 25 bp, probe
tcgggctctgactacagaagtggcc

SEQ ID NO: 279147 - DNA, 25 bp, probe
tcgtgtgacatacagacaagggcaa

SEQ ID NO: 279148 - DNA, 25 bp, probe
tcgggactgagcaggcaatggccta

SEQ ID NO: 279149 - DNA, 25 bp, probe
tcggcggtggattgcgaaggcccgt

SEQ ID NO: 279150 - DNA, 25 bp, probe
tcagcggtggcgaggagaggcgggc

SEQ ID NO: 279151 - DNA, 25 bp, probe
tctcggccctggagatggggggcct

SEQ ID NO: 279152 - DNA, 25 bp, probe
tctggacccggaactgatggtgcgg

SEQ ID NO: 279153 - DNA, 25 bp, probe
tctggaccctgagagctgaatgagg

SEQ ID NO: 279154 - DNA, 25 bp, probe
tcgggagctctggcaagctatagga

SEQ ID NO: 279155 - DNA, 25 bp, probe
tcgagtactctggcattgtcatccg

SEQ ID NO: 279156 - DNA, 25 bp, probe
tcggcatccttggttgaattcttag

SEQ ID NO: 279157 - DNA, 25 bp, probe
tcgagacttagaataacattcacta

SEQ ID NO: 279158 - DNA, 25 bp, probe
tcgtccttgatgcaaacacaactca

SEQ ID NO: 279159 - DNA, 25 bp, probe
tctggctctttccaaactagaaaag

SEQ ID NO: 279160 - DNA, 25 bp, probe
tcggctttctcttcaattcggtaag

SEQ ID NO: 279161 - DNA, 25 bp, probe
tcgtggctactttcacttcagagtg

SEQ ID NO: 279162 - DNA, 25 bp, probe
tctgtggtactcctaattacattgc

SEQ ID NO: 279163 - DNA, 25 bp, probe
tctgggctgacaaacaactgccatc

SEQ ID NO: 279164 - DNA, 25 bp, probe
tcgggatgaccatggactggatgct

SEQ ID NO: 279165 - DNA, 25 bp, probe
tcgggaagccacctaagaatgttta

SEQ ID NO: 279166 - DNA, 25 bp, probe
tcggaacgccaccactgtgaaattt

SEQ ID NO: 279167 - DNA, 25 bp, probe
tcggaacgccaccactgtgaaattt

SEQ ID NO: 279168 - DNA, 25 bp, probe
tcggaatggcgctcagcagatattt

SEQ ID NO: 279169 - DNA, 25 bp, probe
tcggaatggcgctcagcagatattt

SEQ ID NO: 279170 - DNA, 25 bp, probe
tcgggcggctctgcagcagaagtct

SEQ ID NO: 279171 - DNA, 25 bp, probe
tcgggcggctctgcagcagaagtct

SEQ ID NO: 279172 - DNA, 25 bp, probe
tctgggcagcgccccaaagttttgg

SEQ ID NO: 279173 - DNA, 25 bp, probe
tctgggcgggcccagtggagtttgg

SEQ ID NO: 279174 - DNA, 25 bp, probe
tctgtccagttggggtaggtttggg

SEQ ID NO: 279175 - DNA, 25 bp, probe
tctgtcgattggtggtcctttggag

SEQ ID NO: 279176 - DNA, 25 bp, probe
tctgtcagttgccaaaggactttgc

SEQ ID NO: 279177 - DNA, 25 bp, probe
tctgtcctttaacaagctattctgt

SEQ ID NO: 279178 - DNA, 25 bp, probe
tcacccttgtggacgaagcaattgt

SEQ ID NO: 279179 - DNA, 25 bp, probe
tcaccacctgtcagtaaacggggga

SEQ ID NO: 279180 - DNA, 25 bp, probe
tcagaactgcgtattacaatccggc

SEQ ID NO: 279181 - DNA, 25 bp, probe
tcagaactcgttaaagcaaagcgct

SEQ ID NO: 279182 - DNA, 25 bp, probe
tcgtgacggtcaagaacaacaccat

SEQ ID NO: 279183 - DNA, 25 bp, probe
tcgtccgtctctatgacaacttcac

SEQ ID NO: 279184 - DNA, 25 bp, probe
tctgtccggtttgcagtacttgcac

SEQ ID NO: 279185 - DNA, 25 bp, probe
tcgtcacagcggttgaggtctctgg

SEQ ID NO: 279186 - DNA, 25 bp, probe
tcgtcacagcggttgaggtctctgg

SEQ ID NO: 279187 - DNA, 25 bp, probe
tcgggcagcgtgggaggtcatcgag

SEQ ID NO: 279188 - DNA, 25 bp, probe
tcgggcagcgtgggaggtcatcgag

SEQ ID NO: 279189 - DNA, 25 bp, probe
tctgggtcgtggtggtgatcgcagg

SEQ ID NO: 279190 - DNA, 25 bp, probe
tctggtgggccgtggtcaccatgac

SEQ ID NO: 279191 - DNA, 25 bp, probe
tctggggagcgggtgtgctcactta

SEQ ID NO: 279192 - DNA, 25 bp, probe
tctggaatgggagggtctggcttca

SEQ ID NO: 279193 - DNA, 25 bp, probe
tctggaacccagggactgccttgaa

SEQ ID NO: 279194 - DNA, 25 bp, probe
tctgggtcccggggtgcatttgtta

SEQ ID NO: 279195 - DNA, 25 bp, probe
tcggcccaccggggctatttattgt

SEQ ID NO: 279196 - DNA, 25 bp, probe
tctggtccttcggggtgttaatgtg

SEQ ID NO: 279197 - DNA, 25 bp, probe
tctggcctttgggttgttcaacatt

SEQ ID NO: 279198 - DNA, 25 bp, probe
tcggcctcctgggttcaaatgattc

SEQ ID NO: 279199 - DNA, 25 bp, probe
tcggcacgaggattattcaagaatt

SEQ ID NO: 279200 - DNA, 25 bp, probe
tcggacatggcgtatgtcatcaacg

SEQ ID NO: 279201 - DNA, 25 bp, probe
tctgtccatggcctttctaatggaa

SEQ ID NO: 279202 - DNA, 25 bp, probe
tctgttgatgctgttttaggtaagg

SEQ ID NO: 279203 - DNA, 25 bp, probe
tctgtggaggggatgcgactgtagg

SEQ ID NO: 279204 - DNA, 25 bp, probe
tctgttttgtggatcgcagctgacc

SEQ ID NO: 279205 - DNA, 25 bp, probe
tcgtatcttatgctgcgtactgctc

SEQ ID NO: 279206 - DNA, 25 bp, probe
tctgttgctattgatgcaggtcatg

SEQ ID NO: 279207 - DNA, 25 bp, probe
tctgggctgtcgacaggtgtctgac

SEQ ID NO: 279208 - DNA, 25 bp, probe
tctgggcgtccatctgattggaatt

SEQ ID NO: 279209 - DNA, 25 bp, probe
tctgggttacagagtcagcgaatga

SEQ ID NO: 279210 - DNA, 25 bp, probe
tctggtggcattcctttaggaatgc

SEQ ID NO: 279211 - DNA, 25 bp, probe
tcaggtggttagctcaaccaatgga

SEQ ID NO: 279212 - DNA, 25 bp, probe
tcgggcgtattcaacaaccaggaga

SEQ ID NO: 279213 - DNA, 25 bp, probe
tcgggcgtattcaacaaccaggaga

SEQ ID NO: 279214 - DNA, 25 bp, probe
tctggaggaaccgcaagccggagag

SEQ ID NO: 279215 - DNA, 25 bp, probe
tctggaggccacggtcaatgacttc

SEQ ID NO: 279216 - DNA, 25 bp, probe
tctggcagccatacggcaccatgaa

SEQ ID NO: 279217 - DNA, 25 bp, probe
tctggcaggcagccaggatccctga

SEQ ID NO: 279218 - DNA, 25 bp, probe
tctggcagctcacagcacatctgcc

SEQ ID NO: 279219 - DNA, 25 bp, probe
tcggcacatcactgagtcagtcaac

SEQ ID NO: 279220 - DNA, 25 bp, probe
tcggaagctcattgttcagcccaac

SEQ ID NO: 279221 - DNA, 25 bp, probe
tctggaagctgagctccacttccca

SEQ ID NO: 279222 - DNA, 25 bp, probe
tctggaagctgagctccacttccca

SEQ ID NO: 279223 - DNA, 25 bp, probe
tctgagcataatgctcccatctcct

SEQ ID NO: 279224 - DNA, 25 bp, probe
tcgagccaatacctactgctccaag

SEQ ID NO: 279225 - DNA, 25 bp, probe
tcggtcaattgtcactgtcatcaga

SEQ ID NO: 279226 - DNA, 25 bp, probe
tcgtgcacgtcttcgagttcatcga

SEQ ID NO: 279227 - DNA, 25 bp, probe
tcgtgcacgtcttcgagttcatcga

SEQ ID NO: 279228 - DNA, 25 bp, probe
tcgtctcgttccaagatctgtagcg

SEQ ID NO: 279229 - DNA, 25 bp, probe
tcgtcaagtacgaccgcgagatggt

SEQ ID NO: 279230 - DNA, 25 bp, probe
tcgtcaggtgcaggtcagcacgttg

SEQ ID NO: 279231 - DNA, 25 bp, probe
tcgtgtatggacctcaagcgttgga

SEQ ID NO: 279232 - DNA, 25 bp, probe
tcgtgtatggacctcaagcgttgga

SEQ ID NO: 279233 - DNA, 25 bp, probe
tcgttcctactgacattgtattgga

SEQ ID NO: 279234 - DNA, 25 bp, probe
tctgagatttcactgacaactttaa

SEQ ID NO: 279235 - DNA, 25 bp, probe
tctgacattctcaggaagcccccaa

SEQ ID NO: 279236 - DNA, 25 bp, probe
tcgagtatgtcttggaaccgggcta

SEQ ID NO: 279237 - DNA, 25 bp, probe
tcggttactaggaacactggctgtc

SEQ ID NO: 279238 - DNA, 25 bp, probe
tcgtttaccgagacatcaagcctgc

SEQ ID NO: 279239 - DNA, 25 bp, probe
tctgtggtcccaatgtcatcaacca

SEQ ID NO: 279240 - DNA, 25 bp, probe
tctgtggtcccaatgtcatcaacca

SEQ ID NO: 279241 - DNA, 25 bp, probe
tcggtgtcccaactagaactgaaaa

SEQ ID NO: 279242 - DNA, 25 bp, probe
tcggtgtccccacaggatgaaacag

SEQ ID NO: 279243 - DNA, 25 bp, probe
tctgggcattcctaggggagaaaat

SEQ ID NO: 279244 - DNA, 25 bp, probe
tctgggtccgttggggcagaaccat

SEQ ID NO: 279245 - DNA, 25 bp, probe
tcgaggactttctggaggagacgct

SEQ ID NO: 279246 - DNA, 25 bp, probe
tcgagtccgtcacgtgggagaacct

SEQ ID NO: 279247 - DNA, 25 bp, probe
tcgaggccttcgatgcggaaagcat

SEQ ID NO: 279248 - DNA, 25 bp, probe
tcgggacttggcagccagaaacatc

SEQ ID NO: 279249 - DNA, 25 bp, probe
tcgggctttgcagtcccatagaaca

SEQ ID NO: 279250 - DNA, 25 bp, probe
ttgagatctacgccatcgtcggaac

SEQ ID NO: 279251 - DNA, 25 bp, probe
ttgagatctacgccatcgtcggaac

SEQ ID NO: 279252 - DNA, 25 bp, probe
tcgagtatatgcggcacggggacct

SEQ ID NO: 279253 - DNA, 25 bp, probe
tcgagtatatccactccaagaactt

SEQ ID NO: 279254 - DNA, 25 bp, probe
tcgagtatcgtcaccgcaagatgaa

SEQ ID NO: 279255 - DNA, 25 bp, probe
tcgagttctccagggccatgaatga

SEQ ID NO: 279256 - DNA, 25 bp, probe
tcggtttgggcagatcatgattgaa

SEQ ID NO: 279257 - DNA, 25 bp, probe
tcgggcttgggagaatgactatctt

SEQ ID NO: 279258 - DNA, 25 bp, probe
tcggcgtctgggggagatgcgcttc

SEQ ID NO: 279259 - DNA, 25 bp, probe
tcggcgtctgggggagatgcgcttc

SEQ ID NO: 279260 - DNA, 25 bp, probe
tcggttcctggcagaggatgcactc

SEQ ID NO: 279261 - DNA, 25 bp, probe
tcgtgatctggccgcacggaacatc

SEQ ID NO: 279262 - DNA, 25 bp, probe
tctggatctggcacaagtaaaatag

SEQ ID NO: 279263 - DNA, 25 bp, probe
tctggatctggcacaagtaaaatag

SEQ ID NO: 279264 - DNA, 25 bp, probe
tctggaaacttcatgtaaactaccc

SEQ ID NO: 279265 - DNA, 25 bp, probe
tctggaaacttcatgtaaactaccc

SEQ ID NO: 279266 - DNA, 25 bp, probe
tcaggaaacataggttaagccccct

SEQ ID NO: 279267 - DNA, 25 bp, probe
tcaggaaacataggttaagccccct

SEQ ID NO: 279268 - DNA, 25 bp, probe
tcggccatgtcatggtaaacggtcc

SEQ ID NO: 279269 - DNA, 25 bp, probe
tcggcgcgacagtgtagaaagtggc

SEQ ID NO: 279270 - DNA, 25 bp, probe
tcggtgcgatactgatgatgaaatt

SEQ ID NO: 279271 - DNA, 25 bp, probe
tctggggccatacgattgaaaatca

SEQ ID NO: 279272 - DNA, 25 bp, probe
tcgtgggtctcacgatgccttggta

SEQ ID NO: 279273 - DNA, 25 bp, probe
tcgtgtcggactagtgcctgtttat

SEQ ID NO: 279274 - DNA, 25 bp, probe
tcagttcagtagatttccttttttc

SEQ ID NO: 279275 - DNA, 25 bp, probe
tcagtattaaactctcctttgatat

SEQ ID NO: 279276 - DNA, 25 bp, probe
tagtaataaacaacaggggtcattt

SEQ ID NO: 279277 - DNA, 25 bp, probe
tcgtcaaaaacagctggggtccaga

SEQ ID NO: 279278 - DNA, 25 bp, probe
tcgtcagaaaaatgtggaggctcca

SEQ ID NO: 279279 - DNA, 25 bp, probe
tcggcccaagtatgcgggactcacc

SEQ ID NO: 279280 - DNA, 25 bp, probe
tctggaccaagttcgacgtggctga

SEQ ID NO: 279281 - DNA, 25 bp, probe
tctggaccaagttcgacgtggctga

SEQ ID NO: 279282 - DNA, 25 bp, probe
tctggaataatggacgccgctggca

SEQ ID NO: 279283 - DNA, 25 bp, probe
tctggaaaaagccctcaggctgcag

SEQ ID NO: 279284 - DNA, 25 bp, probe
tcggatcccagagtggctcaggtga

SEQ ID NO: 279285 - DNA, 25 bp, probe
tcggctccgaggtggagctgagaca

SEQ ID NO: 279286 - DNA, 25 bp, probe
tcggtgcttgggcagtgcctatgcc

SEQ ID NO: 279287 - DNA, 25 bp, probe
tcggtgcttgggcagtgcctatgcc

SEQ ID NO: 279288 - DNA, 25 bp, probe
tctagtgttgggcaaccattccaag

SEQ ID NO: 279289 - DNA, 25 bp, probe
tctagtgttgggcaaccattccaag

SEQ ID NO: 279290 - DNA, 25 bp, probe
tctaggaagcggcacttcacccaaa

SEQ ID NO: 279291 - DNA, 25 bp, probe
tcttaataggtggcactaccccaaa

SEQ ID NO: 279292 - DNA, 25 bp, probe
tcttccattgaaccacttcgggaaa

SEQ ID NO: 279293 - DNA, 25 bp, probe
tctttaatgaatcatcggcttggta

SEQ ID NO: 279294 - DNA, 25 bp, probe
tctgggcattaagatcggctgggtg

SEQ ID NO: 279295 - DNA, 25 bp, probe
tcttgggcagaacataccgggtggt

SEQ ID NO: 279296 - DNA, 25 bp, probe
tcacctggtggaggtaccgttggtt

SEQ ID NO: 279297 - DNA, 25 bp, probe
tcacctttgctgagttccggggtgc

SEQ ID NO: 279298 - DNA, 25 bp, probe
tctcgctccttgagttcatcgggaa

SEQ ID NO: 279299 - DNA, 25 bp, probe
tctggactcgggctaccaggtggag

SEQ ID NO: 279300 - DNA, 25 bp, probe
tcggactcggacctagaggaggcct

SEQ ID NO: 279301 - DNA, 25 bp, probe
tcggaccgcatgacgcattgtggcg

SEQ ID NO: 279302 - DNA, 25 bp, probe
tcgtacacgcgagctgtggactggt

SEQ ID NO: 279303 - DNA, 25 bp, probe
tcgtgcacactgcacacggtgtctg

SEQ ID NO: 279304 - DNA, 25 bp, probe
tctggacacagtgcccgtgtcggag

SEQ ID NO: 279305 - DNA, 25 bp, probe
tctggaatgcaggtctgtcggctgg

SEQ ID NO: 279306 - DNA, 25 bp, probe
tctggaatgcaggtctgtcggctgg

SEQ ID NO: 279307 - DNA, 25 bp, probe
tcggaggagcattcgctgctggtga

SEQ ID NO: 279308 - DNA, 25 bp, probe
tcgatgaggatgaacgctggacgga

SEQ ID NO: 279309 - DNA, 25 bp, probe
tcgggtgtgtatgtgggcatgtgcc

SEQ ID NO: 279310 - DNA, 25 bp, probe
tcagggctatggtttgggtatggtt

SEQ ID NO: 279311 - DNA, 25 bp, probe
tcagggtgggcagggggttagtttg

SEQ ID NO: 279312 - DNA, 25 bp, probe
tcggatggcggcgggaggttgatgg

SEQ ID NO: 279313 - DNA, 25 bp, probe
tcgggatgactcgggacgtgtatga

SEQ ID NO: 279314 - DNA, 25 bp, probe
tctgggcaacttgggacctgaaggt

SEQ ID NO: 279315 - DNA, 25 bp, probe
tctgggaatgctctggcgtcgaatg

SEQ ID NO: 279316 - DNA, 25 bp, probe
tcgtttcatcattcggcgtgcgaat

SEQ ID NO: 279317 - DNA, 25 bp, probe
tcgtgtgtcctgtcatggggagaac

SEQ ID NO: 279318 - DNA, 25 bp, probe
tctgatatgagctatgtgcatcgtg

SEQ ID NO: 279319 - DNA, 25 bp, probe
tctgcaatgcaggcatcatcagggc

SEQ ID NO: 279320 - DNA, 25 bp, probe
tctgaagcagcttcacactctgcat

SEQ ID NO: 279321 - DNA, 25 bp, probe
tctaatgcatcctatatccagtaag

SEQ ID NO: 279322 - DNA, 25 bp, probe
taagcgacgaccacagtaagatcct

SEQ ID NO: 279323 - DNA, 25 bp, probe
tagactacgaccaggtgaagatcaa

SEQ ID NO: 279324 - DNA, 25 bp, probe
tcaactacgcccacctgtaaaggtt

SEQ ID NO: 279325 - DNA, 25 bp, probe
tctcctaactccattttgaaagctg

SEQ ID NO: 279326 - DNA, 25 bp, probe
tctgacgggtccattaacaaagcgg

SEQ ID NO: 279327 - DNA, 25 bp, probe
tctggcagagttctttaaaacacac

SEQ ID NO: 279328 - DNA, 25 bp, probe
tctgtggcagttatcttaccttccc

SEQ ID NO: 279329 - DNA, 25 bp, probe
tctgtggcagttatcttaccttccc

SEQ ID NO: 279330 - DNA, 25 bp, probe
tcgggagttcagcagtcacacgctg

SEQ ID NO: 279331 - DNA, 25 bp, probe
tcggaaataacacctcacagcagct

SEQ ID NO: 279332 - DNA, 25 bp, probe
tcggaaataacacctcacagcagct

SEQ ID NO: 279333 - DNA, 25 bp, probe
tcgtgatgatgttatatgccccagc

SEQ ID NO: 279334 - DNA, 25 bp, probe
tcgtcactgagtacatggccaaggg

SEQ ID NO: 279335 - DNA, 25 bp, probe
tcgtcagtgagagctgcacctacgc

SEQ ID NO: 279336 - DNA, 25 bp, probe
tcgtggctgagatcatgcccgcaac

SEQ ID NO: 279337 - DNA, 25 bp, probe
tcggagctatgtgctgcaccgctcc

SEQ ID NO: 279338 - DNA, 25 bp, probe
tcggagctatgtgctgcaccgctcc

SEQ ID NO: 279339 - DNA, 25 bp, probe
tcggagtgattgcctacatcttgct

SEQ ID NO: 279340 - DNA, 25 bp, probe
tcagacatgtgagcactacgggtgg

SEQ ID NO: 279341 - DNA, 25 bp, probe
tctgagctaagccttacgggtctgc

SEQ ID NO: 279342 - DNA, 25 bp, probe
tcgtgctccaggagcgcgtggtgtg

SEQ ID NO: 279343 - DNA, 25 bp, probe
tcggcccagatagcctgtgggatgc

SEQ ID NO: 279344 - DNA, 25 bp, probe
tctgtgggcagtagccctgtgtggc

SEQ ID NO: 279345 - DNA, 25 bp, probe
tctgtagacgaagctctgcgtcacc

SEQ ID NO: 279346 - DNA, 25 bp, probe
tctgtaccggacactgtgtctcctc

SEQ ID NO: 279347 - DNA, 25 bp, probe
tctgtaccggacactgtgtctcctc

SEQ ID NO: 279348 - DNA, 25 bp, probe
tctggagccaggctgcctgggctcc

SEQ ID NO: 279349 - DNA, 25 bp, probe
tctggagccaggctgcctgggctcc

SEQ ID NO: 279350 - DNA, 25 bp, probe
tctgggcaggaaccgtgggatcgcc

SEQ ID NO: 279351 - DNA, 25 bp, probe
tctgggcaggaaccgtgggatcgcc

SEQ ID NO: 279352 - DNA, 25 bp, probe
tcgggggagcagatgagggccctgc

SEQ ID NO: 279353 - DNA, 25 bp, probe
tcgggggagggtaggtgagagtcag

SEQ ID NO: 279354 - DNA, 25 bp, probe
tcggccggagagctgaggggagggg

SEQ ID NO: 279355 - DNA, 25 bp, probe
tcggcggagaccagggctggtggaa

SEQ ID NO: 279356 - DNA, 25 bp, probe
tcggcagtggagctactgctgtggt

SEQ ID NO: 279357 - DNA, 25 bp, probe
tcggcagaggagtgagctctgtggt

SEQ ID NO: 279358 - DNA, 25 bp, probe
tctgggagatattttcactgggtgt

SEQ ID NO: 279359 - DNA, 25 bp, probe
tctgggaagttactctcatggttat

SEQ ID NO: 279360 - DNA, 25 bp, probe
tctggggactgtggtccattgtaca

SEQ ID NO: 279361 - DNA, 25 bp, probe
tctggaggtctcatttcttgtaaag

SEQ ID NO: 279362 - DNA, 25 bp, probe
tctggggaatttggtttggacaact

SEQ ID NO: 279363 - DNA, 25 bp, probe
tctggggttcttggtgtgtgggaga

SEQ ID NO: 279364 - DNA, 25 bp, probe
tctggaggttctatttacgggtttg

SEQ ID NO: 279365 - DNA, 25 bp, probe
tctggaggttctatttacgggtttg

SEQ ID NO: 279366 - DNA, 25 bp, probe
tctggtgctgtcctgttttactgga

SEQ ID NO: 279367 - DNA, 25 bp, probe
tctggtgtctgacaccctgagctgc

SEQ ID NO: 279368 - DNA, 25 bp, probe
tctgtgctgatctggaccatctttg

SEQ ID NO: 279369 - DNA, 25 bp, probe
tctgtgcagatgagcagtcacactg

SEQ ID NO: 279370 - DNA, 25 bp, probe
tctgtgcagatgagcagtcacactg

SEQ ID NO: 279371 - DNA, 25 bp, probe
tctgtggagcacgatgtgcccagca

SEQ ID NO: 279372 - DNA, 25 bp, probe
tctgtgatgatcctcatatggccca

SEQ ID NO: 279373 - DNA, 25 bp, probe
tctgtgctgcacgtatgcagtatcc

SEQ ID NO: 279374 - DNA, 25 bp, probe
tctgatgctgagcgaagctataggc

SEQ ID NO: 279375 - DNA, 25 bp, probe
tctgatgtgatgcctgttgagtcag

SEQ ID NO: 279376 - DNA, 25 bp, probe
tctggcttggttcgagataggagct

SEQ ID NO: 279377 - DNA, 25 bp, probe
tctggttgtgtcccaagaggtgttg

SEQ ID NO: 279378 - DNA, 25 bp, probe
tctgttcgagtccctagagggccgg

SEQ ID NO: 279379 - DNA, 25 bp, probe
tctgttcgagtccctagagggccgc

SEQ ID NO: 279380 - DNA, 25 bp, probe
tctggtctttgggttggaggctcca

SEQ ID NO: 279381 - DNA, 25 bp, probe
tctggtctttgggttggaggctcca

SEQ ID NO: 279382 - DNA, 25 bp, probe
tcggcttggattattctgcaggttc

SEQ ID NO: 279383 - DNA, 25 bp, probe
tcgtgctcctgatcaatttcgtatt

SEQ ID NO: 279384 - DNA, 25 bp, probe
tctgttcctgttactgttgggtctt

SEQ ID NO: 279385 - DNA, 25 bp, probe
tctgttccctggcatgttggtcata

SEQ ID NO: 279386 - DNA, 25 bp, probe
tctgttccctacttgatcttcaagg

SEQ ID NO: 279387 - DNA, 25 bp, probe
tctgttccctacttgatcttcaagg

SEQ ID NO: 279388 - DNA, 25 bp, probe
tctggtccaattttggcttcatgga

SEQ ID NO: 279389 - DNA, 25 bp, probe
tctgtatgttttcatgggtcaggac

SEQ ID NO: 279390 - DNA, 25 bp, probe
tctgaatgacttcgggggccaggta

SEQ ID NO: 279391 - DNA, 25 bp, probe
tctgaatgacttcgggggccaggta

SEQ ID NO: 279392 - DNA, 25 bp, probe
tcggagattgtggggggccggcgag

SEQ ID NO: 279393 - DNA, 25 bp, probe
tcggagattgtggggggccggcgag

SEQ ID NO: 279394 - DNA, 25 bp, probe
tcgtggtggtgcaggggacaagagg

SEQ ID NO: 279395 - DNA, 25 bp, probe
tctgatagtgggggccggcctagag

SEQ ID NO: 279396 - DNA, 25 bp, probe
tctgggcttgtgcacactgacccag

SEQ ID NO: 279397 - DNA, 25 bp, probe
tctgtggctgtttccagtccaaagt

SEQ ID NO: 279398 - DNA, 25 bp, probe
tctggggaagactattccagagacg

SEQ ID NO: 279399 - DNA, 25 bp, probe
tctgggaaaatctattcctgccacc

SEQ ID NO: 279400 - DNA, 25 bp, probe
tctggtgaacaccttttgtgacagc

SEQ ID NO: 279401 - DNA, 25 bp, probe
tctggctgaacacagctgtggagac

SEQ ID NO: 279402 - DNA, 25 bp, probe
tctggaggactcaagcaatggagag

SEQ ID NO: 279403 - DNA, 25 bp, probe
tctggggttggcaacaggacagagt

SEQ ID NO: 279404 - DNA, 25 bp, probe
tcggagcctcattgagacaggggag

SEQ ID NO: 279405 - DNA, 25 bp, probe
tcggaacacattcagctgctgggtg

SEQ ID NO: 279406 - DNA, 25 bp, probe
tcggaacatcggcactgccaggtag

SEQ ID NO: 279407 - DNA, 25 bp, probe
tcgggagctcggtaccagagtgtaa

SEQ ID NO: 279408 - DNA, 25 bp, probe
tcgtggagacagggcatttgagttt

SEQ ID NO: 279409 - DNA, 25 bp, probe
tctatggaacgctcatgatctttta

SEQ ID NO: 279410 - DNA, 25 bp, probe
tctatggcaccctcagttgggtcta

SEQ ID NO: 279411 - DNA, 25 bp, probe
tcggcctcccaaagtgctgggatta

SEQ ID NO: 279412 - DNA, 25 bp, probe
tcggcctcccaaagtgctgggatta

SEQ ID NO: 279413 - DNA, 25 bp, probe
tctggctctgctggagcgggtggga

SEQ ID NO: 279414 - DNA, 25 bp, probe
tctggctctgctggagcgggtggga

SEQ ID NO: 279415 - DNA, 25 bp, probe
tctgggctccagagtggggatgaca

SEQ ID NO: 279416 - DNA, 25 bp, probe
tctgggctccagagtggggatgaca

SEQ ID NO: 279417 - DNA, 25 bp, probe
tctggaccacttactggtgaaagca

SEQ ID NO: 279418 - DNA, 25 bp, probe
tcggattcagctggtagggaaagac

SEQ ID NO: 279419 - DNA, 25 bp, probe
tctgaagtggggtataatgaaagtc

SEQ ID NO: 279420 - DNA, 25 bp, probe
tctgaagctgggctgtccttcaacc

SEQ ID NO: 279421 - DNA, 25 bp, probe
tctgaagctgggctgtccttcaacc

SEQ ID NO: 279422 - DNA, 25 bp, probe
tctggtgaggaccttgccctcaccc

SEQ ID NO: 279423 - DNA, 25 bp, probe
tctggctggtgagttcacccgactg

SEQ ID NO: 279424 - DNA, 25 bp, probe
tctgtggcagtgatccaccatccac

SEQ ID NO: 279425 - DNA, 25 bp, probe
tctgtggcagattgactcctaccat

SEQ ID NO: 279426 - DNA, 25 bp, probe
tctgtgacttcatgctctgataact

SEQ ID NO: 279427 - DNA, 25 bp, probe
tctgggctacactatctaacatctg

SEQ ID NO: 279428 - DNA, 25 bp, probe
tctggagctgaacatctcaggtgcc

SEQ ID NO: 279429 - DNA, 25 bp, probe
tctgtacatacacatgttcctcctg

SEQ ID NO: 279430 - DNA, 25 bp, probe
tctgtgattgattttggtcctcctc

SEQ ID NO: 279431 - DNA, 25 bp, probe
tctgtgattgattttggtcctcctc

SEQ ID NO: 279432 - DNA, 25 bp, probe
tctgtgtttattagccttccagcca

SEQ ID NO: 279433 - DNA, 25 bp, probe
tctgtgtttattagccttccagcca

SEQ ID NO: 279434 - DNA, 25 bp, probe
tcgtgtttgctatgccaactagtag

SEQ ID NO: 279435 - DNA, 25 bp, probe
tcggcatttctttccagacatctaa

SEQ ID NO: 279436 - DNA, 25 bp, probe
tctgggatttatgctcatgaactaa

SEQ ID NO: 279437 - DNA, 25 bp, probe
tctggatttctagcacattactaaa

SEQ ID NO: 279438 - DNA, 25 bp, probe
tctgttaatctaacaatagactatt

SEQ ID NO: 279439 - DNA, 25 bp, probe
tctgtctatttcaatatagaactgt

SEQ ID NO: 279440 - DNA, 25 bp, probe
tctgttcagcattcactaaccctgt

SEQ ID NO: 279441 - DNA, 25 bp, probe
tctgtttcaacattgagagctgggt

SEQ ID NO: 279442 - DNA, 25 bp, probe
tctgctcttagaaagggctggggtt

SEQ ID NO: 279443 - DNA, 25 bp, probe
tctgtccaagattatggatgatgat

SEQ ID NO: 279444 - DNA, 25 bp, probe
tctggctgcaagaaatgtgttgcta

SEQ ID NO: 279445 - DNA, 25 bp, probe
tctggtgacagaatatgctagtgga

SEQ ID NO: 279446 - DNA, 25 bp, probe
tctggtgacagaatatgctagtgga

SEQ ID NO: 279447 - DNA, 25 bp, probe
tctggcatgcagccaggtgtggagg

SEQ ID NO: 279448 - DNA, 25 bp, probe
tctgtgcatgtgcaggtcgggggtg

SEQ ID NO: 279449 - DNA, 25 bp, probe
tctgtgtgtgcctcacgaaatggct

SEQ ID NO: 279450 - DNA, 25 bp, probe
tctgtgctgggatcatggaacttgc

SEQ ID NO: 279451 - DNA, 25 bp, probe
tctgggagagaaggcgaaccacctc

SEQ ID NO: 279452 - DNA, 25 bp, probe
ttggggaagaacgaagccacctttg

SEQ ID NO: 279453 - DNA, 25 bp, probe
tctggggaaggaccaacccatgccc

SEQ ID NO: 279454 - DNA, 25 bp, probe
tctgcaggaagacactaatcgaatg

SEQ ID NO: 279455 - DNA, 25 bp, probe
tctgggaggtcttctcatatggacg

SEQ ID NO: 279456 - DNA, 25 bp, probe
tcgggacttctctcatgatgacact

SEQ ID NO: 279457 - DNA, 25 bp, probe
tctggtagctgtagattctggacct

SEQ ID NO: 279458 - DNA, 25 bp, probe
tctgtgctcctaatgacacttgacc

SEQ ID NO: 279459 - DNA, 25 bp, probe
tctgtgtccacagacacgtctgccg

SEQ ID NO: 279460 - DNA, 25 bp, probe
tctgtttgcactggacatattccct

SEQ ID NO: 279461 - DNA, 25 bp, probe
tcgtgtcacagtggacagatggcct

SEQ ID NO: 279462 - DNA, 25 bp, probe
tctggtcagagatacctggcctggt

SEQ ID NO: 279463 - DNA, 25 bp, probe
tctggtaggcatcacgagctggggc

SEQ ID NO: 279464 - DNA, 25 bp, probe
tctggtaggcatcacgagctggggc

SEQ ID NO: 279465 - DNA, 25 bp, probe
tcggatggggagagactgcgcaggc

SEQ ID NO: 279466 - DNA, 25 bp, probe
tcggatggggagagactgcgcaggc

SEQ ID NO: 279467 - DNA, 25 bp, probe
tcggagcggaaggtgacgcgcatgg

SEQ ID NO: 279468 - DNA, 25 bp, probe
tcggattgagaactcttcagccatg

SEQ ID NO: 279469 - DNA, 25 bp, probe
tctggttgagctcagtggagccatg

SEQ ID NO: 279470 - DNA, 25 bp, probe
tctgacttggccatgggagcctttc

SEQ ID NO: 279471 - DNA, 25 bp, probe
tctcctggggccaggatccgtgtgc

SEQ ID NO: 279472 - DNA, 25 bp, probe
tcatcgggggccgggaggtgatccc

SEQ ID NO: 279473 - DNA, 25 bp, probe
tctcctgaccgacctggagttaccc

SEQ ID NO: 279474 - DNA, 25 bp, probe
tctcctgttcgaactcgagggaccc

SEQ ID NO: 279475 - DNA, 25 bp, probe
tctgtgggacgaagaccgggcaccc

SEQ ID NO: 279476 - DNA, 25 bp, probe
tctgtgggacgaagaccgggcaccc

SEQ ID NO: 279477 - DNA, 25 bp, probe
tctggaagacctcaccatgggacgc

SEQ ID NO: 279478 - DNA, 25 bp, probe
tactgaaaccctgccattgaattgc

SEQ ID NO: 279479 - DNA, 25 bp, probe
tactgaaaccctgccattgaattgc

SEQ ID NO: 279480 - DNA, 25 bp, probe
tcatcggaaccctagccgtgtttgc

SEQ ID NO: 279481 - DNA, 25 bp, probe
tcatcggaaccctagccgtgtttgc

SEQ ID NO: 279482 - DNA, 25 bp, probe
ttcgaacagccctggtggtaggccc

SEQ ID NO: 279483 - DNA, 25 bp, probe
tctccaactccctctgggaaggtga

SEQ ID NO: 279484 - DNA, 25 bp, probe
ttgccaagtacctcggggggctgag

SEQ ID NO: 279485 - DNA, 25 bp, probe
tctccatagagacagacggggtggc

SEQ ID NO: 279486 - DNA, 25 bp, probe
tctgacattgatggcgaggcggagg

SEQ ID NO: 279487 - DNA, 25 bp, probe
tctggattactgccacagcaaggga

SEQ ID NO: 279488 - DNA, 25 bp, probe
tctgcgatacgaccatcaacagaga

SEQ ID NO: 279489 - DNA, 25 bp, probe
tctgctctcaggctgaaatctggca

SEQ ID NO: 279490 - DNA, 25 bp, probe
tctctggcagagtgactttacaact

SEQ ID NO: 279491 - DNA, 25 bp, probe
tctgtctagaatcctgctttacagg

SEQ ID NO: 279492 - DNA, 25 bp, probe
tctgcattaaaatgctcatttccgg

SEQ ID NO: 279493 - DNA, 25 bp, probe
tctgcttacagctacagtcacatcc

SEQ ID NO: 279494 - DNA, 25 bp, probe
tctggtcatcgcggcagtgatcaaa

SEQ ID NO: 279495 - DNA, 25 bp, probe
tctgttcatcaccagtctgtaaaat

SEQ ID NO: 279496 - DNA, 25 bp, probe
tctgttcaacatcgtcaggatccta

SEQ ID NO: 279497 - DNA, 25 bp, probe
tctgggagacactcatggcagccta

SEQ ID NO: 279498 - DNA, 25 bp, probe
tctgggcgcacctttagcaggtgga

SEQ ID NO: 279499 - DNA, 25 bp, probe
tctggtggcagcgttgagaaggggg

SEQ ID NO: 279500 - DNA, 25 bp, probe
tctggtctgccaggtgaacggtgcc

SEQ ID NO: 279501 - DNA, 25 bp, probe
tctggtctgccaggtgaacggtgcc

SEQ ID NO: 279502 - DNA, 25 bp, probe
tctgccggccacataacatttgcac

SEQ ID NO: 279503 - DNA, 25 bp, probe
tctggcgggcacacagtgcaatgtg

SEQ ID NO: 279504 - DNA, 25 bp, probe
tctggcgggcaggacacaaactccc

SEQ ID NO: 279505 - DNA, 25 bp, probe
tctcaggaggagctgctaaagcggc

SEQ ID NO: 279506 - DNA, 25 bp, probe
tctcaggaggagctgctaaagcggc

SEQ ID NO: 279507 - DNA, 25 bp, probe
tctgcggtgaggcaggggagtctgc

SEQ ID NO: 279508 - DNA, 25 bp, probe
tcggctgtattaatcacgcgatgtt

SEQ ID NO: 279509 - DNA, 25 bp, probe
tcggattctgtcacagccgcaatgt

SEQ ID NO: 279510 - DNA, 25 bp, probe
tcggcatggtgtatgagggcaatgc

SEQ ID NO: 279511 - DNA, 25 bp, probe
tcggcatcgtctatcgggacatgaa

SEQ ID NO: 279512 - DNA, 25 bp, probe
tcggcatcgtctatcgggacatgaa

SEQ ID NO: 279513 - DNA, 25 bp, probe
tctgtgaccttgctcggagcattga

SEQ ID NO: 279514 - DNA, 25 bp, probe
tctgtgccctcaggtggggcttacc

SEQ ID NO: 279515 - DNA, 25 bp, probe
tctgatccctctgtacaggctggat

SEQ ID NO: 279516 - DNA, 25 bp, probe
tctggccctggggcagcagcagggt

SEQ ID NO: 279517 - DNA, 25 bp, probe
tctggtctattgggccacatatgtc

SEQ ID NO: 279518 - DNA, 25 bp, probe
tctggcgttatctccacaatgccta

SEQ ID NO: 279519 - DNA, 25 bp, probe
tctggcgttatctccacaatgccta

SEQ ID NO: 279520 - DNA, 25 bp, probe
tctggctttaaatcacagtgcacaa

SEQ ID NO: 279521 - DNA, 25 bp, probe
tctggccatgtcacaggcaagttca

SEQ ID NO: 279522 - DNA, 25 bp, probe
tctgggatgtgcacgaatgactgtt

SEQ ID NO: 279523 - DNA, 25 bp, probe
tctgggaggcttacagggtgtacac

SEQ ID NO: 279524 - DNA, 25 bp, probe
tctcggacctttcagctgtgaacat

SEQ ID NO: 279525 - DNA, 25 bp, probe
tctgggagcatcttcagcaagttca

SEQ ID NO: 279526 - DNA, 25 bp, probe
tctggatatctgctggaagcctcaa

SEQ ID NO: 279527 - DNA, 25 bp, probe
tctggtttggtgtcaacagctcaca

SEQ ID NO: 279528 - DNA, 25 bp, probe
tctcgttttgtcaggcagctatgca

SEQ ID NO: 279529 - DNA, 25 bp, probe
tctccattatgttcgtggtgtaaag

SEQ ID NO: 279530 - DNA, 25 bp, probe
tctgcacattagagggacagccaaa

SEQ ID NO: 279531 - DNA, 25 bp, probe
tctgcacattagagggacagccaaa

SEQ ID NO: 279532 - DNA, 25 bp, probe
tctggcagctagttagtgccatggc

SEQ ID NO: 279533 - DNA, 25 bp, probe
tctccctaggaagtgccagtgcagc

SEQ ID NO: 279534 - DNA, 25 bp, probe
tctccctgaggactggcttgacagg

SEQ ID NO: 279535 - DNA, 25 bp, probe
tctccctgaggactggcttgacagg

SEQ ID NO: 279536 - DNA, 25 bp, probe
tctcctacgcaccattttgtcaggt

SEQ ID NO: 279537 - DNA, 25 bp, probe
tctcctacgcaccattttgtcaggt

SEQ ID NO: 279538 - DNA, 25 bp, probe
tctccaacctccaggtacaggtgct

SEQ ID NO: 279539 - DNA, 25 bp, probe
tctccaatccaagatggcaacgagg

SEQ ID NO: 279540 - DNA, 25 bp, probe
tctccacatctctgaagaagttgag

SEQ ID NO: 279541 - DNA, 25 bp, probe
tctccctccaggaggagtgagaatg

SEQ ID NO: 279542 - DNA, 25 bp, probe
tctgcctgtccggaacgggaggctg

SEQ ID NO: 279543 - DNA, 25 bp, probe
tctgcccttcttcagtgggagtctg

SEQ ID NO: 279544 - DNA, 25 bp, probe
tctggccttttcaagcagtggatgg

SEQ ID NO: 279545 - DNA, 25 bp, probe
tctgtccagatcacaaggggcagga

SEQ ID NO: 279546 - DNA, 25 bp, probe
tctgtccagatcacaaggggcagga

SEQ ID NO: 279547 - DNA, 25 bp, probe
tctgctccttcaacaaggcgacgag

SEQ ID NO: 279548 - DNA, 25 bp, probe
tctgcccccaaaagtgtcaaggggc

SEQ ID NO: 279549 - DNA, 25 bp, probe
tctgtcccgcaagggcggcaagtga

SEQ ID NO: 279550 - DNA, 25 bp, probe
tctggacggcaaggactgtgccagt

SEQ ID NO: 279551 - DNA, 25 bp, probe
tctgtacgagatgctcattggccag

SEQ ID NO: 279552 - DNA, 25 bp, probe
tctgcaccgagttccataggcacag

SEQ ID NO: 279553 - DNA, 25 bp, probe
tctgcacctcttggctcgggtgcag

SEQ ID NO: 279554 - DNA, 25 bp, probe
tctgcacctcttggctcgggtgcag

SEQ ID NO: 279555 - DNA, 25 bp, probe
tctggaatttgtgcctgatgtgcct

SEQ ID NO: 279556 - DNA, 25 bp, probe
tctggagttttggggtgctgctctg

SEQ ID NO: 279557 - DNA, 25 bp, probe
tctggtgatactttgggtgcatttg

SEQ ID NO: 279558 - DNA, 25 bp, probe
tctgggatgtggtattggtgctttg

SEQ ID NO: 279559 - DNA, 25 bp, probe
tctggtgggagaatctataccttgt

SEQ ID NO: 279560 - DNA, 25 bp, probe
tctcggaactgaactgaactctttt

SEQ ID NO: 279561 - DNA, 25 bp, probe
tctcgaaattggaggactcctttga

SEQ ID NO: 279562 - DNA, 25 bp, probe
tctccaaagggaacgacattgccct

SEQ ID NO: 279563 - DNA, 25 bp, probe
tctggccacgggtttacatgtccac

SEQ ID NO: 279564 - DNA, 25 bp, probe
tctggcaccaggggtttcctgagct

SEQ ID NO: 279565 - DNA, 25 bp, probe
tctggcaccaggggtttcctgagct

SEQ ID NO: 279566 - DNA, 25 bp, probe
tctggactcaagggattctcctgcc

SEQ ID NO: 279567 - DNA, 25 bp, probe
tctgtcccaggaaattgtgcggctc

SEQ ID NO: 279568 - DNA, 25 bp, probe
tctgggcgagcgtgattgtgctgcg

SEQ ID NO: 279569 - DNA, 25 bp, probe
tcggatgtgaggttcagcagtgccg

SEQ ID NO: 279570 - DNA, 25 bp, probe
tctgtgtgtgtgcatgtatgtgtgc

SEQ ID NO: 279571 - DNA, 25 bp, probe
tctggtgctctgaggagatctccca

SEQ ID NO: 279572 - DNA, 25 bp, probe
tctgggtgcggaggagctcccagca

SEQ ID NO: 279573 - DNA, 25 bp, probe
tctggggctgtgaaacgctcacaga

SEQ ID NO: 279574 - DNA, 25 bp, probe
tctggaggctatatcatggccacat

SEQ ID NO: 279575 - DNA, 25 bp, probe
tctggcaatcattaaagtgcataga

SEQ ID NO: 279576 - DNA, 25 bp, probe
tctggctgaagctaaagatcaacaa

SEQ ID NO: 279577 - DNA, 25 bp, probe
tctgacgttgcagaaatccattcat

SEQ ID NO: 279578 - DNA, 25 bp, probe
tctgcaagtctagacaactgctccc

SEQ ID NO: 279579 - DNA, 25 bp, probe
tctggcagccggtaacagctgacct

SEQ ID NO: 279580 - DNA, 25 bp, probe
tctggcacgggccagccagggttta

SEQ ID NO: 279581 - DNA, 25 bp, probe
tctggcacgggccagccagggttta

SEQ ID NO: 279582 - DNA, 25 bp, probe
tctggcctgagcctaccatgaggct

SEQ ID NO: 279583 - DNA, 25 bp, probe
tctggctgtgcggttctcagatggt

SEQ ID NO: 279584 - DNA, 25 bp, probe
tctgtctgtagaggcttcatatgag

SEQ ID NO: 279585 - DNA, 25 bp, probe
tctgtctccagcagctgctcataga

SEQ ID NO: 279586 - DNA, 25 bp, probe
tctgtgggcaagcctgctctagagc

SEQ ID NO: 279587 - DNA, 25 bp, probe
tctgtggaccacagcctaagctgag

SEQ ID NO: 279588 - DNA, 25 bp, probe
tctgggatagaaatgtttaggagta

SEQ ID NO: 279589 - DNA, 25 bp, probe
tctctggtggcattcctttaggaat

SEQ ID NO: 279590 - DNA, 25 bp, probe
tctgcaggtccagtggtttcggcaa

SEQ ID NO: 279591 - DNA, 25 bp, probe
tctgaagtgctagctgttaaggaaa

SEQ ID NO: 279592 - DNA, 25 bp, probe
tctcaaattaactgtattggtgtaa

SEQ ID NO: 279593 - DNA, 25 bp, probe
tctgattttgaagggttctcgtatg

SEQ ID NO: 279594 - DNA, 25 bp, probe
tctgaatttgaaggttttgagtata

SEQ ID NO: 279595 - DNA, 25 bp, probe
tctgatatttacagctttggtgtgg

SEQ ID NO: 279596 - DNA, 25 bp, probe
tctggatggtcagcggttgcgtgga

SEQ ID NO: 279597 - DNA, 25 bp, probe
tcggactgtgtgcaggttgcagagg

SEQ ID NO: 279598 - DNA, 25 bp, probe
tcggtcgagtgccatttgatgcaga

SEQ ID NO: 279599 - DNA, 25 bp, probe
tctggaaagagccttatgatcgagc

SEQ ID NO: 279600 - DNA, 25 bp, probe
tctgaagcagagccctgggacggac

SEQ ID NO: 279601 - DNA, 25 bp, probe
tctggcacagtgccttgggactgga

SEQ ID NO: 279602 - DNA, 25 bp, probe
tcggacgggattcgaggcgtgcgag

SEQ ID NO: 279603 - DNA, 25 bp, probe
tctgagaggggactggcatgggggg

SEQ ID NO: 279604 - DNA, 25 bp, probe
tctggtggggctgccaggggagacc

SEQ ID NO: 279605 - DNA, 25 bp, probe
tctggcgggagtctcagccgaagag

SEQ ID NO: 279606 - DNA, 25 bp, probe
tctggcggagggcatgagcctggga

SEQ ID NO: 279607 - DNA, 25 bp, probe
tctggggagggtccctccatgtggc

SEQ ID NO: 279608 - DNA, 25 bp, probe
tctggcaagggggccctgccaggga

SEQ ID NO: 279609 - DNA, 25 bp, probe
tctgaaagggatgccctgcagcctg

SEQ ID NO: 279610 - DNA, 25 bp, probe
tctgaaaaggatgccctgcagtgtg

SEQ ID NO: 279611 - DNA, 25 bp, probe
tctgaaaaagtatcctgcttctgat

SEQ ID NO: 279612 - DNA, 25 bp, probe
tctgacttaggattggccttttgat

SEQ ID NO: 279613 - DNA, 25 bp, probe
tctgtttcatggaacctatgtttat

SEQ ID NO: 279614 - DNA, 25 bp, probe
tctggtagctgggacgctggtttat

SEQ ID NO: 279615 - DNA, 25 bp, probe
tctgtgtcaggggacagcttgtgtc

SEQ ID NO: 279616 - DNA, 25 bp, probe
tctgggatgatgggagagctctggc

SEQ ID NO: 279617 - DNA, 25 bp, probe
tctgggggaagaatgctctggctac

SEQ ID NO: 279618 - DNA, 25 bp, probe
tctgtggctgggctatgccaactca

SEQ ID NO: 279619 - DNA, 25 bp, probe
tctggcctgagtgacagcctgacca

SEQ ID NO: 279620 - DNA, 25 bp, probe
tctgtgcctgtgaccagacggcagc

SEQ ID NO: 279621 - DNA, 25 bp, probe
tctgtgcctgtgaccagacggcagc

SEQ ID NO: 279622 - DNA, 25 bp, probe
tctgtgtgctctacacagacctcct

SEQ ID NO: 279623 - DNA, 25 bp, probe
tctgttgctgcataatgatcctccc

SEQ ID NO: 279624 - DNA, 25 bp, probe
tctgtgattgatcaactctcccgaa

SEQ ID NO: 279625 - DNA, 25 bp, probe
tctggatacagttagctgccttcga

SEQ ID NO: 279626 - DNA, 25 bp, probe
tctctgcatagaggtgagtccaaca

SEQ ID NO: 279627 - DNA, 25 bp, probe
tctggcatcatgacggatggacaga

SEQ ID NO: 279628 - DNA, 25 bp, probe
tctggtcagatccacagccacagaa

SEQ ID NO: 279629 - DNA, 25 bp, probe
tctggtactctgtgaaagaagagaa

SEQ ID NO: 279630 - DNA, 25 bp, probe
tctgtgtcactctaaagggaactgt

SEQ ID NO: 279631 - DNA, 25 bp, probe
tctgtctcctgtgaagatggacggt

SEQ ID NO: 279632 - DNA, 25 bp, probe
tctctgcccctggatagtgtccagc

SEQ ID NO: 279633 - DNA, 25 bp, probe
tctctaggatctggaaggccgctgc

SEQ ID NO: 279634 - DNA, 25 bp, probe
tctctaggcatcaccacggtgctga

SEQ ID NO: 279635 - DNA, 25 bp, probe
tctctaggccttcaggactctagaa

SEQ ID NO: 279636 - DNA, 25 bp, probe
tctttgggcctcctggactacagga

SEQ ID NO: 279637 - DNA, 25 bp, probe
tctttggttaagggagctacgctgt

SEQ ID NO: 279638 - DNA, 25 bp, probe
tcttttgggaaggctgtcgactggg

SEQ ID NO: 279639 - DNA, 25 bp, probe
tcattttggaaatgcttctccacca

SEQ ID NO: 279640 - DNA, 25 bp, probe
tcttttgatttatcacttacccaaa

SEQ ID NO: 279641 - DNA, 25 bp, probe
tctatttgacttgtggttgaattaa

SEQ ID NO: 279642 - DNA, 25 bp, probe
tctatggcccctggggatttataaa

SEQ ID NO: 279643 - DNA, 25 bp, probe
tctgatgtgccgctggctgaacttt

SEQ ID NO: 279644 - DNA, 25 bp, probe
tctgggcctttgtatgagctgcatt

SEQ ID NO: 279645 - DNA, 25 bp, probe
tctgtgcagccactgttaagccatg

SEQ ID NO: 279646 - DNA, 25 bp, probe
tcggccaccatgtcgcaagaatgat

SEQ ID NO: 279647 - DNA, 25 bp, probe
tcggacaccatctaccagatcatgt

SEQ ID NO: 279648 - DNA, 25 bp, probe
tctggagccccaactagatcagcag

SEQ ID NO: 279649 - DNA, 25 bp, probe
tctggagccccaactagatcagcag

SEQ ID NO: 279650 - DNA, 25 bp, probe
tctgaggactctgacattgatggcg

SEQ ID NO: 279651 - DNA, 25 bp, probe
tctgattatgctttcctaatggagt

SEQ ID NO: 279652 - DNA, 25 bp, probe
tctgtcctggacagcatcaaggagg

SEQ ID NO: 279653 - DNA, 25 bp, probe
tctgtcctggacagcatcaaggagg

SEQ ID NO: 279654 - DNA, 25 bp, probe
tctgtcctgggattgtgcaagaagg

SEQ ID NO: 279655 - DNA, 25 bp, probe
tctgaactggactagtgaaaaatct

SEQ ID NO: 279656 - DNA, 25 bp, probe
tctgcaacgggctaatccacggaat

SEQ ID NO: 279657 - DNA, 25 bp, probe
tctgcaacgggctaatccacggaat

SEQ ID NO: 279658 - DNA, 25 bp, probe
tcatgaagggcgcgacccgcgaata

SEQ ID NO: 279659 - DNA, 25 bp, probe
tctgcaaggactgtgttcccgagac

SEQ ID NO: 279660 - DNA, 25 bp, probe
tctgcaaggactgtgttcccgagac

SEQ ID NO: 279661 - DNA, 25 bp, probe
tctgcaaggcagtaattccccttag

SEQ ID NO: 279662 - DNA, 25 bp, probe
tctgcaaacaaacacctccttatta

SEQ ID NO: 279663 - DNA, 25 bp, probe
tctactggataacaccttctggtca

SEQ ID NO: 279664 - DNA, 25 bp, probe
tctgaaggctgaagcccctttggct

SEQ ID NO: 279665 - DNA, 25 bp, probe
tctgggctgggaagccctgttggcc

SEQ ID NO: 279666 - DNA, 25 bp, probe
tctgggctgggaagccctgttggcc

SEQ ID NO: 279667 - DNA, 25 bp, probe
tctgctaggtggtgccctgattgtt

SEQ ID NO: 279668 - DNA, 25 bp, probe
tctctagcctcgagtccgaggtatg

SEQ ID NO: 279669 - DNA, 25 bp, probe
tctctaggaaatctggtgaagtaac

SEQ ID NO: 279670 - DNA, 25 bp, probe
tctcttggaattttcctaggtaaat

SEQ ID NO: 279671 - DNA, 25 bp, probe
tctcttggaattttcctaggtaaat

SEQ ID NO: 279672 - DNA, 25 bp, probe
tctgttgtgtttttgcctaaatact

SEQ ID NO: 279673 - DNA, 25 bp, probe
tctgtttgtgtttgctgccttactg

SEQ ID NO: 279674 - DNA, 25 bp, probe
tctcattactgtctgtggctaagtc

SEQ ID NO: 279675 - DNA, 25 bp, probe
tctcattactgtctgtggctaagtc

SEQ ID NO: 279676 - DNA, 25 bp, probe
tctaaactgtagctgtattagcagc

SEQ ID NO: 279677 - DNA, 25 bp, probe
tctggaaattaccttaatatgcaag

SEQ ID NO: 279678 - DNA, 25 bp, probe
tctggaatattacctgtgtcatcaa

SEQ ID NO: 279679 - DNA, 25 bp, probe
tctgagttattacgctacatgacaa

SEQ ID NO: 279680 - DNA, 25 bp, probe
tctggtttataactactaaaaatat

SEQ ID NO: 279681 - DNA, 25 bp, probe
tctggtgttatatctttattaaata

SEQ ID NO: 279682 - DNA, 25 bp, probe
tctggtgttactggtttcttacatt

SEQ ID NO: 279683 - DNA, 25 bp, probe
tctggccttgaagcagttttcctct

SEQ ID NO: 279684 - DNA, 25 bp, probe
tctgtccaatgacagcccttttctc

SEQ ID NO: 279685 - DNA, 25 bp, probe
tctgcatctcacacgactttagttt

SEQ ID NO: 279686 - DNA, 25 bp, probe
tctcaaccagatgatctgcttactt

SEQ ID NO: 279687 - DNA, 25 bp, probe
tctggccacagaagatcttctcctg

SEQ ID NO: 279688 - DNA, 25 bp, probe
tctgtgccaagtcgactatgcctta

SEQ ID NO: 279689 - DNA, 25 bp, probe
tctgtgccaagtcgactatgcctta

SEQ ID NO: 279690 - DNA, 25 bp, probe
tctgccgcaaaggccttgcctagac

SEQ ID NO: 279691 - DNA, 25 bp, probe
tctgtccagaaaggattgaatgtga

SEQ ID NO: 279692 - DNA, 25 bp, probe
tctgtgggaaaccgctggatctgag

SEQ ID NO: 279693 - DNA, 25 bp, probe
tctgtctgaataacctgcgtgtcta

SEQ ID NO: 279694 - DNA, 25 bp, probe
tctgtctactattccttgattgcta

SEQ ID NO: 279695 - DNA, 25 bp, probe
tctgtgccctaatgcttgcattgtg

SEQ ID NO: 279696 - DNA, 25 bp, probe
tctgtgccctaatgcttgcattgtg

SEQ ID NO: 279697 - DNA, 25 bp, probe
tctgctttagagtacttgcacggca

SEQ ID NO: 279698 - DNA, 25 bp, probe
tctgtgtccagatgtttgactggtt

SEQ ID NO: 279699 - DNA, 25 bp, probe
tctgcattacagtctgaattgagtg

SEQ ID NO: 279700 - DNA, 25 bp, probe
tctgcagtatgctctgcctgctgaa

SEQ ID NO: 279701 - DNA, 25 bp, probe
tctggtcatgcttacactgatacag

SEQ ID NO: 279702 - DNA, 25 bp, probe
tctgtctcctgatgcctgagcagag

SEQ ID NO: 279703 - DNA, 25 bp, probe
tctgtacactgaccttaggcatgga

SEQ ID NO: 279704 - DNA, 25 bp, probe
tctgtacctaagctcagtatgcaaa

SEQ ID NO: 279705 - DNA, 25 bp, probe
tctgttttgaagctcatgggaaaat

SEQ ID NO: 279706 - DNA, 25 bp, probe
ttggtcgtgaagatccggaagaaca

SEQ ID NO: 279707 - DNA, 25 bp, probe
tctggacgtgaagtctcgggcaaag

SEQ ID NO: 279708 - DNA, 25 bp, probe
tctggaagaggaaccgggcaaatgg

SEQ ID NO: 279709 - DNA, 25 bp, probe
tctgagaggcagtcttccttggcaa

SEQ ID NO: 279710 - DNA, 25 bp, probe
tctggacacgtaacctatgtcagac

SEQ ID NO: 279711 - DNA, 25 bp, probe
tctgaacacagagtccctgaaaggc

SEQ ID NO: 279712 - DNA, 25 bp, probe
tctggacaaacttctgcgatacgac

SEQ ID NO: 279713 - DNA, 25 bp, probe
tctggacaaacttctgcgatacgac

SEQ ID NO: 279714 - DNA, 25 bp, probe
tctgtgtcaaagaagtgcagaacgt

SEQ ID NO: 279715 - DNA, 25 bp, probe
tctgtgtacataaagtcatcaaagt

SEQ ID NO: 279716 - DNA, 25 bp, probe
tctgtgcaacaaaacattcagaacc

SEQ ID NO: 279717 - DNA, 25 bp, probe
tctgtcaaccacttcattatgagac

SEQ ID NO: 279718 - DNA, 25 bp, probe
tctgtgcaagccttcctggaagaag

SEQ ID NO: 279719 - DNA, 25 bp, probe
tctggctgacaatcctggaaatctg

SEQ ID NO: 279720 - DNA, 25 bp, probe
tctggtcagacatcgctggaaatga

SEQ ID NO: 279721 - DNA, 25 bp, probe
tctggcaagctataggagagaatgg

SEQ ID NO: 279722 - DNA, 25 bp, probe
tctgtgggcttcttggaacacatgg

SEQ ID NO: 279723 - DNA, 25 bp, probe
tctgatggcccttgggagacagatg

SEQ ID NO: 279724 - DNA, 25 bp, probe
tctgtgggtctgtggcacagcagga

SEQ ID NO: 279725 - DNA, 25 bp, probe
tctgtggcgacgggtgatgctcaag

SEQ ID NO: 279726 - DNA, 25 bp, probe
tctgaccaacaggctgttctgcact

SEQ ID NO: 279727 - DNA, 25 bp, probe
tctggccaccatattatgcatgccc

SEQ ID NO: 279728 - DNA, 25 bp, probe
tctggctcacactggaagcagctac

SEQ ID NO: 279729 - DNA, 25 bp, probe
tctggatcaacatggatgctgcccc

SEQ ID NO: 279730 - DNA, 25 bp, probe
tcggccagaagtagcacagacccca

SEQ ID NO: 279731 - DNA, 25 bp, probe
tcggccatgaaaatccatcacgaat

SEQ ID NO: 279732 - DNA, 25 bp, probe
tctggcttgtcattctgtacactga

SEQ ID NO: 279733 - DNA, 25 bp, probe
tctgagttttgtgtacctgatgtga

SEQ ID NO: 279734 - DNA, 25 bp, probe
tctactatttatgtgatccttttgg

SEQ ID NO: 279735 - DNA, 25 bp, probe
tctacggtttcaccatcgttcgtga

SEQ ID NO: 279736 - DNA, 25 bp, probe
tctaggggttgcgaatccctcctga

SEQ ID NO: 279737 - DNA, 25 bp, probe
tctgagagggttcctttctctaggg

SEQ ID NO: 279738 - DNA, 25 bp, probe
tctggagatggatccttccatcttg

SEQ ID NO: 279739 - DNA, 25 bp, probe
tctgatttggaatctctccatctgt

SEQ ID NO: 279740 - DNA, 25 bp, probe
tctgcagttggtggcactccgatat

SEQ ID NO: 279741 - DNA, 25 bp, probe
tctgcagtgggtactcgtcagcaaa

SEQ ID NO: 279742 - DNA, 25 bp, probe
tcatcttcaagtactcggccaaaac

SEQ ID NO: 279743 - DNA, 25 bp, probe
tcagcgcccagatccggaaaaactt

SEQ ID NO: 279744 - DNA, 25 bp, probe
tcggccccagctgcaggaaacagca

SEQ ID NO: 279745 - DNA, 25 bp, probe
tctgtgtcctactacaggaaaataa

SEQ ID NO: 279746 - DNA, 25 bp, probe
tctggtgaccagcagcggacaaata

SEQ ID NO: 279747 - DNA, 25 bp, probe
tctgtggatccgggccaccagaaga

SEQ ID NO: 279748 - DNA, 25 bp, probe
tctgaaagtagccccattcataaga

SEQ ID NO: 279749 - DNA, 25 bp, probe
tctgcaaacaatccctttcatacca

SEQ ID NO: 279750 - DNA, 25 bp, probe
tctcaaacaaaccctacaactataa

SEQ ID NO: 279751 - DNA, 25 bp, probe
tctcaacaacaaccacaaaatctaa

SEQ ID NO: 279752 - DNA, 25 bp, probe
ttaactgacgaagaagcaactaagt

SEQ ID NO: 279753 - DNA, 25 bp, probe
ttacggccaggagatacaaccagca

SEQ ID NO: 279754 - DNA, 25 bp, probe
tctgaaacccgaggatgccaagccc

SEQ ID NO: 279755 - DNA, 25 bp, probe
tctgagaggccaggacgtccatggg

SEQ ID NO: 279756 - DNA, 25 bp, probe
tctggaggctcccatgggctaggag

SEQ ID NO: 279757 - DNA, 25 bp, probe
tctccagtgcctctcgatgtaggat

SEQ ID NO: 279758 - DNA, 25 bp, probe
tcatccgtggtttcaaggggtgaac

SEQ ID NO: 279759 - DNA, 25 bp, probe
tctcctgggttacacagctttaccg

SEQ ID NO: 279760 - DNA, 25 bp, probe
tctctcctgggttacacagctttac

SEQ ID NO: 279761 - DNA, 25 bp, probe
tctctcctgggttacacagctttac

SEQ ID NO: 279762 - DNA, 25 bp, probe
tctgcccttgggcatcaactggttc

SEQ ID NO: 279763 - DNA, 25 bp, probe
tctctacttggggaaatcaggtgca

SEQ ID NO: 279764 - DNA, 25 bp, probe
tctgctgccttagctaaatcaggtg

SEQ ID NO: 279765 - DNA, 25 bp, probe
tctgctgccttagctaaatcaggtg

SEQ ID NO: 279766 - DNA, 25 bp, probe
tctgatattccagctaaaccaggag

SEQ ID NO: 279767 - DNA, 25 bp, probe
tctgatattccagctaaaccaggag

SEQ ID NO: 279768 - DNA, 25 bp, probe
tctgtttacacattttgcacttggg

SEQ ID NO: 279769 - DNA, 25 bp, probe
tctgtttaatccagatgccaagggc

SEQ ID NO: 279770 - DNA, 25 bp, probe
tctgcttttgatgctcttctcaagg

SEQ ID NO: 279771 - DNA, 25 bp, probe
tctgtgttggtcttcatcccagaag

SEQ ID NO: 279772 - DNA, 25 bp, probe
tctgtttttctgcacactcaataga

SEQ ID NO: 279773 - DNA, 25 bp, probe
tctgttttgttccttacaatatcaa

SEQ ID NO: 279774 - DNA, 25 bp, probe
tactcccttgtacttgtcaagtcga

SEQ ID NO: 279775 - DNA, 25 bp, probe
tctcccaaggtacttcaaaggctca

SEQ ID NO: 279776 - DNA, 25 bp, probe
tctcccaagtgtaaaataccctcac

SEQ ID NO: 279777 - DNA, 25 bp, probe
tctgcaccgaaatggaaattccaca

SEQ ID NO: 279778 - DNA, 25 bp, probe
tcttacgaatggggaaattccacca

SEQ ID NO: 279779 - DNA, 25 bp, probe
tcttttctagtgagaaagtccccac

SEQ ID NO: 279780 - DNA, 25 bp, probe
tctgtcttttgttataggggcccca

SEQ ID NO: 279781 - DNA, 25 bp, probe
tctgtcttttacacagtggtcattc

SEQ ID NO: 279782 - DNA, 25 bp, probe
tctcttccttcagaagtttcgtcta

SEQ ID NO: 279783 - DNA, 25 bp, probe
tctcctccgtcctaagagtatcatc

SEQ ID NO: 279784 - DNA, 25 bp, probe
tctgtgatattgtccaagaatgtat

SEQ ID NO: 279785 - DNA, 25 bp, probe
tctgtgtatatgcccgtatgtgcgt

SEQ ID NO: 279786 - DNA, 25 bp, probe
tctgtgcttcataatagtgtgtggc

SEQ ID NO: 279787 - DNA, 25 bp, probe
tctgagggcatcatagggggacccc

SEQ ID NO: 279788 - DNA, 25 bp, probe
tctgtgggctgcatcatgggggagc

SEQ ID NO: 279789 - DNA, 25 bp, probe
tctgtgggctgcatcatgggggagc

SEQ ID NO: 279790 - DNA, 25 bp, probe
tctgtgggctgcatcatgggggagc

SEQ ID NO: 279791 - DNA, 25 bp, probe
tctgtggtctcgtcagagagcagga

SEQ ID NO: 279792 - DNA, 25 bp, probe
tctggcaccatcctcagaacaggaa

SEQ ID NO: 279793 - DNA, 25 bp, probe
tctgagccccgaatctgacattaga

SEQ ID NO: 279794 - DNA, 25 bp, probe
tctggcttgtccatctggtctaagg

SEQ ID NO: 279795 - DNA, 25 bp, probe
tctggctttggcagcaggttcactg

SEQ ID NO: 279796 - DNA, 25 bp, probe
tcatccttctgagagggttcctttc

SEQ ID NO: 279797 - DNA, 25 bp, probe
tcaccctcttcaagggcttctttga

SEQ ID NO: 279798 - DNA, 25 bp, probe
tcaccctcttcaagggcttctttga

SEQ ID NO: 279799 - DNA, 25 bp, probe
tctcatttcctctggggactgtggt

SEQ ID NO: 279800 - DNA, 25 bp, probe
tctcttccagcttttgggacttggg

SEQ ID NO: 279801 - DNA, 25 bp, probe
tctcttccagcttttgggacttggg

SEQ ID NO: 279802 - DNA, 25 bp, probe
tctcctctagcctgtttgttgtggg

SEQ ID NO: 279803 - DNA, 25 bp, probe
tctccttcagtggagtactgattgc

SEQ ID NO: 279804 - DNA, 25 bp, probe
tctcctatcacggatttgtacagct

SEQ ID NO: 279805 - DNA, 25 bp, probe
tctcgactcaagaaggttaacattt

SEQ ID NO: 279806 - DNA, 25 bp, probe
tctccccaagacagctcaaaatatc

SEQ ID NO: 279807 - DNA, 25 bp, probe
tctcccacgactcagtgaagtttct

SEQ ID NO: 279808 - DNA, 25 bp, probe
tctcctcggactgtgtgcaggttgc

SEQ ID NO: 279809 - DNA, 25 bp, probe
tctcctcccgtgatgagaagtcatg

SEQ ID NO: 279810 - DNA, 25 bp, probe
tctccacttggtttggaaaatcaca

SEQ ID NO: 279811 - DNA, 25 bp, probe
tctgcccctggaagattaaaccagc

SEQ ID NO: 279812 - DNA, 25 bp, probe
tctccacctggcagaaaagtaactg

SEQ ID NO: 279813 - DNA, 25 bp, probe
tctctgcagctctgacccaaattta

SEQ ID NO: 279814 - DNA, 25 bp, probe
tctgccttcggagggaaattgtaaa

SEQ ID NO: 279815 - DNA, 25 bp, probe
tctgcattttcttggagaaatttaa

SEQ ID NO: 279816 - DNA, 25 bp, probe
tctgttttctggtgttatatcttta

SEQ ID NO: 279817 - DNA, 25 bp, probe
tctccttttggtgtaatgttttaca

SEQ ID NO: 279818 - DNA, 25 bp, probe
tctcccagttattgcctaatactta

SEQ ID NO: 279819 - DNA, 25 bp, probe
tattccaggttccacaaaacttacg

SEQ ID NO: 279820 - DNA, 25 bp, probe
tattccaggttccacaaaacttacg

SEQ ID NO: 279821 - DNA, 25 bp, probe
tctacctggattgtcaacaactgaa

SEQ ID NO: 279822 - DNA, 25 bp, probe
tttcctgggattcaaacctgcatat

SEQ ID NO: 279823 - DNA, 25 bp, probe
tctgtcctgggattcaacccactat

SEQ ID NO: 279824 - DNA, 25 bp, probe
tctgtcctcaggatggatgtccctt

SEQ ID NO: 279825 - DNA, 25 bp, probe
tctgaactggctgagaattctcctt

SEQ ID NO: 279826 - DNA, 25 bp, probe
tctgtcagtggcttatgtcatttac

SEQ ID NO: 279827 - DNA, 25 bp, probe
tctgtggatgacacatgcctcttcc

SEQ ID NO: 279828 - DNA, 25 bp, probe
tctgtggatgacacatgcctcttcc

SEQ ID NO: 279829 - DNA, 25 bp, probe
tctggggcagcagacatgctgcttc

SEQ ID NO: 279830 - DNA, 25 bp, probe
tctgaaggggaaaggcattctttca

SEQ ID NO: 279831 - DNA, 25 bp, probe
tctaaagcctgaaaacctcttatac

SEQ ID NO: 279832 - DNA, 25 bp, probe
tctgaaaccattaatattccttctt

SEQ ID NO: 279833 - DNA, 25 bp, probe
tctgaaccgttgcttgtggatttat

SEQ ID NO: 279834 - DNA, 25 bp, probe
tctggactttctcttggacattgta

SEQ ID NO: 279835 - DNA, 25 bp, probe
tctggactttctcttggacattgta

SEQ ID NO: 279836 - DNA, 25 bp, probe
tctggaccttgaccttcagaacttc

SEQ ID NO: 279837 - DNA, 25 bp, probe
tctggaccttgaccttcagaacttc

SEQ ID NO: 279838 - DNA, 25 bp, probe
tctcggctcttgacacttagccgct

SEQ ID NO: 279839 - DNA, 25 bp, probe
tctggatgcttgagtcttaccgtaa

SEQ ID NO: 279840 - DNA, 25 bp, probe
tctgacattgtattgtgttacctaa

SEQ ID NO: 279841 - DNA, 25 bp, probe
tctgtcttgtgggtgtctgacagtg

SEQ ID NO: 279842 - DNA, 25 bp, probe
tctgcgcttcgtggtgtatgaggaa

SEQ ID NO: 279843 - DNA, 25 bp, probe
tctgagcatctactggtttgtgctc

SEQ ID NO: 279844 - DNA, 25 bp, probe
tctgatgctgaatctctttgtcgcc

SEQ ID NO: 279845 - DNA, 25 bp, probe
tctgctgagcaatgtcgtcttcatg

SEQ ID NO: 279846 - DNA, 25 bp, probe
tctggatgccaggcacctcattgag

SEQ ID NO: 279847 - DNA, 25 bp, probe
tctgcagactcatgcagccctatgg

SEQ ID NO: 279848 - DNA, 25 bp, probe
tctgatggactggtgtcctatggag

SEQ ID NO: 279849 - DNA, 25 bp, probe
tctgactgagatgttgcctgatgga

SEQ ID NO: 279850 - DNA, 25 bp, probe
tctgactgagatgttgcctgatgga

SEQ ID NO: 279851 - DNA, 25 bp, probe
tctgcgctggcttttgacagaggca

SEQ ID NO: 279852 - DNA, 25 bp, probe
tctgcagatggaatccgagcagggc

SEQ ID NO: 279853 - DNA, 25 bp, probe
tctgcatggcgtacctcatgaagac

SEQ ID NO: 279854 - DNA, 25 bp, probe
tctgtggctgcaacggcatgaactt

SEQ ID NO: 279855 - DNA, 25 bp, probe
tctgtgtctggatggctgccatctt

SEQ ID NO: 279856 - DNA, 25 bp, probe
tctggatctctgttatgtgccattt

SEQ ID NO: 279857 - DNA, 25 bp, probe
tctgtgactccaatgtcatccatca

SEQ ID NO: 279858 - DNA, 25 bp, probe
tctgtggagacaatgtcatcaacca

SEQ ID NO: 279859 - DNA, 25 bp, probe
tctgcaatggatcctgtccacaaca

SEQ ID NO: 279860 - DNA, 25 bp, probe
tctgaatatgcaactgtccacttaa

SEQ ID NO: 279861 - DNA, 25 bp, probe
tctgagcaacctgtccctagaaggc

SEQ ID NO: 279862 - DNA, 25 bp, probe
tctgttacctttccatctagcaagt

SEQ ID NO: 279863 - DNA, 25 bp, probe
tctgttacctttccatctagcaagt

SEQ ID NO: 279864 - DNA, 25 bp, probe
tctgtgtacacatctattctcaaag

SEQ ID NO: 279865 - DNA, 25 bp, probe
tctgttccacatatatttccacttc

SEQ ID NO: 279866 - DNA, 25 bp, probe
tctgcttctcttactatactcatac

SEQ ID NO: 279867 - DNA, 25 bp, probe
tctgtttgtactgatactagaccat

SEQ ID NO: 279868 - DNA, 25 bp, probe
tctgggtgtctcgcaccataagcca

SEQ ID NO: 279869 - DNA, 25 bp, probe
tctggggtgtcaccaagcaaggcta

SEQ ID NO: 279870 - DNA, 25 bp, probe
tctggagttggggcacagcgaggta

SEQ ID NO: 279871 - DNA, 25 bp, probe
tctgttttcttggccggatggctga

SEQ ID NO: 279872 - DNA, 25 bp, probe
tctgatttatgcactccggagtcaa

SEQ ID NO: 279873 - DNA, 25 bp, probe
tctgacttctcccatctagtggaaa

SEQ ID NO: 279874 - DNA, 25 bp, probe
tctgactgacatcaacagagagaaa

SEQ ID NO: 279875 - DNA, 25 bp, probe
tcatgactatacgctaagagaactt

SEQ ID NO: 279876 - DNA, 25 bp, probe
tctgctgtctactccaagaaaccaa

SEQ ID NO: 279877 - DNA, 25 bp, probe
tctgctggcagagagccacgcaaac

SEQ ID NO: 279878 - DNA, 25 bp, probe
tctctgcaagactcatcgccaaagc

SEQ ID NO: 279879 - DNA, 25 bp, probe
tctcagaggcacttcgcaggaaatg

SEQ ID NO: 279880 - DNA, 25 bp, probe
tctcagaggcacttcgcaggaaatg

SEQ ID NO: 279881 - DNA, 25 bp, probe
tctccaggacctcagcgagaaagga

SEQ ID NO: 279882 - DNA, 25 bp, probe
tctgaaggtcactccggctgaccga

SEQ ID NO: 279883 - DNA, 25 bp, probe
tctggggttcatctagggacacgtt

SEQ ID NO: 279884 - DNA, 25 bp, probe
tctgggtttgctgtggggacctgat

SEQ ID NO: 279885 - DNA, 25 bp, probe
tctgggatatgtgttggaaaactgc

SEQ ID NO: 279886 - DNA, 25 bp, probe
tctgtgctgtttgtcgtgaaaagct

SEQ ID NO: 279887 - DNA, 25 bp, probe
tctgggctttcactctggtgaaact

SEQ ID NO: 279888 - DNA, 25 bp, probe
tctgtactacaacgctggtgaaatt

SEQ ID NO: 279889 - DNA, 25 bp, probe
tctgtactacaacgctggtgaaatt

SEQ ID NO: 279890 - DNA, 25 bp, probe
tctgaggagacccgctggcagaacg

SEQ ID NO: 279891 - DNA, 25 bp, probe
tctgctttgacccactggatggatc

SEQ ID NO: 279892 - DNA, 25 bp, probe
tctgattttacgacggcatgggaat

SEQ ID NO: 279893 - DNA, 25 bp, probe
tctgtttaacgtggctctgcagcag

SEQ ID NO: 279894 - DNA, 25 bp, probe
tctgtttaacgtggctctgcagcag

SEQ ID NO: 279895 - DNA, 25 bp, probe
tctgctagttcagatggattgcaat

SEQ ID NO: 279896 - DNA, 25 bp, probe
tctgtcgcccaggctggagtgcagt

SEQ ID NO: 279897 - DNA, 25 bp, probe
tctgtcgcccaggctggagtgcagt

SEQ ID NO: 279898 - DNA, 25 bp, probe
tctgtctcccaggctggagcgtagt

SEQ ID NO: 279899 - DNA, 25 bp, probe
tctgtcgcccaggctggagggcagt

SEQ ID NO: 279900 - DNA, 25 bp, probe
tctgtggcccagcctggagtacagt

SEQ ID NO: 279901 - DNA, 25 bp, probe
tctgtggcccagcctggagtacagt

SEQ ID NO: 279902 - DNA, 25 bp, probe
tctgtgaccactgctggaccaagga

SEQ ID NO: 279903 - DNA, 25 bp, probe
tctgtgaccactgctggaccaagga

SEQ ID NO: 279904 - DNA, 25 bp, probe
tatgtgaccacccggaaaggggtct

SEQ ID NO: 279905 - DNA, 25 bp, probe
tatgtgaccacccggaaaggggtct

SEQ ID NO: 279906 - DNA, 25 bp, probe
tctgtacgcccagggaaagcggcgt

SEQ ID NO: 279907 - DNA, 25 bp, probe
tctggatccccaggtaaggatagca

SEQ ID NO: 279908 - DNA, 25 bp, probe
tctggtgcctccttgattggcttaa

SEQ ID NO: 279909 - DNA, 25 bp, probe
tctggtacctatggtcgtgtatata

SEQ ID NO: 279910 - DNA, 25 bp, probe
tctggtacctatggtcgtgtatata

SEQ ID NO: 279911 - DNA, 25 bp, probe
tctgttcaaattgtgaggttctatc

SEQ ID NO: 279912 - DNA, 25 bp, probe
tcagtaaatactgttcgcttttcta

SEQ ID NO: 279913 - DNA, 25 bp, probe
tcagtaaatactgttcgcttttcta

SEQ ID NO: 279914 - DNA, 25 bp, probe
tcaaaattgagattccccttttcca

SEQ ID NO: 279915 - DNA, 25 bp, probe
tctaaattaatctctgccttttctg

SEQ ID NO: 279916 - DNA, 25 bp, probe
tctgaaaaagacaccgtttcttgaa

SEQ ID NO: 279917 - DNA, 25 bp, probe
tctgaccctggagaaccatttcatt

SEQ ID NO: 279918 - DNA, 25 bp, probe
tctgaccgaggtggacaccatggtg

SEQ ID NO: 279919 - DNA, 25 bp, probe
tctgttgcaaagtaagccgatggga

SEQ ID NO: 279920 - DNA, 25 bp, probe
tctgtggccagatctggcctgtgga

SEQ ID NO: 279921 - DNA, 25 bp, probe
tctgaagctaacaggcctgctgggc

SEQ ID NO: 279922 - DNA, 25 bp, probe
tctgagactaagggtgaaagtggtt

SEQ ID NO: 279923 - DNA, 25 bp, probe
tctgagccacaaggggaagggggtg

SEQ ID NO: 279924 - DNA, 25 bp, probe
tctgtccacatgtgggacagggctg

SEQ ID NO: 279925 - DNA, 25 bp, probe
tctgtccagcttcagtgacacaagc

SEQ ID NO: 279926 - DNA, 25 bp, probe
tttcccttggatcagccaagcgaaa

SEQ ID NO: 279927 - DNA, 25 bp, probe
ttcccacgttgacaccaagaaacca

SEQ ID NO: 279928 - DNA, 25 bp, probe
tctcccaggctggcaaagcaaaaag

SEQ ID NO: 279929 - DNA, 25 bp, probe
tctcgatcgtgttataacacaccca

SEQ ID NO: 279930 - DNA, 25 bp, probe
tctttcgtgttcaaaccacggagtt

SEQ ID NO: 279931 - DNA, 25 bp, probe
tctttcgtgttcaaaccacggagtt

SEQ ID NO: 279932 - DNA, 25 bp, probe
tctcggaggtacaaccctgggagtg

SEQ ID NO: 279933 - DNA, 25 bp, probe
tctcaagggctagcatccctgagga

SEQ ID NO: 279934 - DNA, 25 bp, probe
tctccagaactagacgccatggctg

SEQ ID NO: 279935 - DNA, 25 bp, probe
tctccttactgggacgacatctctg

SEQ ID NO: 279936 - DNA, 25 bp, probe
tctccccctggatggacatgtggac

SEQ ID NO: 279937 - DNA, 25 bp, probe
tctcacttccggtttgacgtggagt

SEQ ID NO: 279938 - DNA, 25 bp, probe
tctgccttcatctgcagtaacgggg

SEQ ID NO: 279939 - DNA, 25 bp, probe
tctgatgtttgctcagtgcaaggtg

SEQ ID NO: 279940 - DNA, 25 bp, probe
tcattacattgttcaggctacgtga

SEQ ID NO: 279941 - DNA, 25 bp, probe
tctgctcaacggccaggtacgagaa

SEQ ID NO: 279942 - DNA, 25 bp, probe
tctgctaatcatgtgggtgagccag

SEQ ID NO: 279943 - DNA, 25 bp, probe
tctgctgatagagtctgtgttggtc

SEQ ID NO: 279944 - DNA, 25 bp, probe
tctgcggcaaattgtgcttggctgc

SEQ ID NO: 279945 - DNA, 25 bp, probe
tctgcaccgactaatgctcgactgc

SEQ ID NO: 279946 - DNA, 25 bp, probe
tctgaaggagttggctggactggtt

SEQ ID NO: 279947 - DNA, 25 bp, probe
tctgaaggagttggctggactggtt

SEQ ID NO: 279948 - DNA, 25 bp, probe
tctgcaagcgttgcctggatgcggt

SEQ ID NO: 279949 - DNA, 25 bp, probe
tctgcaaggctagtctggggggatt

SEQ ID NO: 279950 - DNA, 25 bp, probe
tctgcaaggctagtctggggggatt

SEQ ID NO: 279951 - DNA, 25 bp, probe
tctgcgagagccgcttcatgcgggt

SEQ ID NO: 279952 - DNA, 25 bp, probe
tctcggaggtccacacagggtgtga

SEQ ID NO: 279953 - DNA, 25 bp, probe
tctcactggaggccaaacaggaatg

SEQ ID NO: 279954 - DNA, 25 bp, probe
tctgcttgatatcccaagttggaag

SEQ ID NO: 279955 - DNA, 25 bp, probe
tctgcatgtgttcaacagcctggaa

SEQ ID NO: 279956 - DNA, 25 bp, probe
tctgagtttagattcccttgaagat

SEQ ID NO: 279957 - DNA, 25 bp, probe
tctagtttaatcccatgttgacagg

SEQ ID NO: 279958 - DNA, 25 bp, probe
tctgaagtgtaaccctgtccagcgt

SEQ ID NO: 279959 - DNA, 25 bp, probe
tctgaagtgtaaccctgtccagcgt

SEQ ID NO: 279960 - DNA, 25 bp, probe
tctgaagttcccttctgttcagcaa

SEQ ID NO: 279961 - DNA, 25 bp, probe
tctgtagtgtcccactcgataaaga

SEQ ID NO: 279962 - DNA, 25 bp, probe
tctaaagtccacttcagttaagaac

SEQ ID NO: 279963 - DNA, 25 bp, probe
ttaccctccatggtcgttaaaggag

SEQ ID NO: 279964 - DNA, 25 bp, probe
tctacacccgtttcttaaaaggcag

SEQ ID NO: 279965 - DNA, 25 bp, probe
tctagggccttttttcaataacttg

SEQ ID NO: 279966 - DNA, 25 bp, probe
tctagggccttttttcaataacttg

SEQ ID NO: 279967 - DNA, 25 bp, probe
tctggggtctttttatgcatttgca

SEQ ID NO: 279968 - DNA, 25 bp, probe
tctggggttctcaagatttattcag

SEQ ID NO: 279969 - DNA, 25 bp, probe
tctggggtcatcctgagaaggtcat

SEQ ID NO: 279970 - DNA, 25 bp, probe
tctggggataagctgaggtgactaa

SEQ ID NO: 279971 - DNA, 25 bp, probe
tctgctgtggtatcagtgggcgatt

SEQ ID NO: 279972 - DNA, 25 bp, probe
tctctgctgtggtatcagtgggcga

SEQ ID NO: 279973 - DNA, 25 bp, probe
tctgacagtggcgacgatgaacatg

SEQ ID NO: 279974 - DNA, 25 bp, probe
tctgcaagcggagggttcacatgta

SEQ ID NO: 279975 - DNA, 25 bp, probe
tctgcaagcggagggttcacatgta

SEQ ID NO: 279976 - DNA, 25 bp, probe
tctgaagcaagtgcgttcagctgct

SEQ ID NO: 279977 - DNA, 25 bp, probe
tctgaagtatgtgctgtctcatgtc

SEQ ID NO: 279978 - DNA, 25 bp, probe
tctgaagttgcagtcttgcgtgtgg

SEQ ID NO: 279979 - DNA, 25 bp, probe
tctcagaatacagcccagttggatc

SEQ ID NO: 279980 - DNA, 25 bp, probe
tctgcaggacacacctgaggtggat

SEQ ID NO: 279981 - DNA, 25 bp, probe
tctgcaggacacacctgaggtggat

SEQ ID NO: 279982 - DNA, 25 bp, probe
tctgaggtcactgctgtgagctggg

SEQ ID NO: 279983 - DNA, 25 bp, probe
tctgaagtgtctcctgttgtgaggg

SEQ ID NO: 279984 - DNA, 25 bp, probe
tctgaaggttttctgtgtgctgcac

SEQ ID NO: 279985 - DNA, 25 bp, probe
tctgacagttccagcacgtgtgtcc

SEQ ID NO: 279986 - DNA, 25 bp, probe
tctcccatgtcgtgacgtattactc

SEQ ID NO: 279987 - DNA, 25 bp, probe
tctcagccattggggcagggaccct

SEQ ID NO: 279988 - DNA, 25 bp, probe
tctgctccatcggggcagggggtat

SEQ ID NO: 279989 - DNA, 25 bp, probe
tctgtctcctgatgaacgggttgac

SEQ ID NO: 279990 - DNA, 25 bp, probe
tctcccggtcagttcgggatgtggc

SEQ ID NO: 279991 - DNA, 25 bp, probe
tctccactgttgggtgggtgggccc

SEQ ID NO: 279992 - DNA, 25 bp, probe
tctccatctgtttggtgggggtaga

SEQ ID NO: 279993 - DNA, 25 bp, probe
tctgccgctgagagggggctgggaa

SEQ ID NO: 279994 - DNA, 25 bp, probe
tctgtccgagtttgcagggtgctga

SEQ ID NO: 279995 - DNA, 25 bp, probe
tctgtgcacggagttggcatggtgc

SEQ ID NO: 279996 - DNA, 25 bp, probe
tctgtcacatgccaattcagttgtc

SEQ ID NO: 279997 - DNA, 25 bp, probe
tctgtacagtcaggtctgctctggt

SEQ ID NO: 279998 - DNA, 25 bp, probe
tctgtatcagtgtaactgccagttc

SEQ ID NO: 279999 - DNA, 25 bp, probe
tctgtatgcggttgattgtcttgtc

SEQ ID NO: 280000 - DNA, 25 bp, probe
tctgtgtgcttatgtctcttgtgac

SEQ ID NO: 280001 - DNA, 25 bp, probe
tctgtatgatgttactttatgtgaa

SEQ ID NO: 280002 - DNA, 25 bp, probe
tctgtattatcaatttctcatagac

SEQ ID NO: 280003 - DNA, 25 bp, probe
tctgtgacatcttttcttcaagcct

SEQ ID NO: 280004 - DNA, 25 bp, probe
tctgtggcgtctttcttcaaaatga

SEQ ID NO: 280005 - DNA, 25 bp, probe
tctgtggctttctccatcatagaat

SEQ ID NO: 280006 - DNA, 25 bp, probe
tctgctttcttctcctgttgaaatg

SEQ ID NO: 280007 - DNA, 25 bp, probe
tctgccctgtgttatccagttatga

SEQ ID NO: 280008 - DNA, 25 bp, probe
tctgcaccgtcttgtagcatggttc

SEQ ID NO: 280009 - DNA, 25 bp, probe
tctgttgcaccttgtagtggattct

SEQ ID NO: 280010 - DNA, 25 bp, probe
tctgggactagttgagttgtatctt

SEQ ID NO: 280011 - DNA, 25 bp, probe
tctgaagcagcttggagtttgtctg

SEQ ID NO: 280012 - DNA, 25 bp, probe
tctacagagtgtggcggacgattga

SEQ ID NO: 280013 - DNA, 25 bp, probe
tctagggttgctggagcctgagtca

SEQ ID NO: 280014 - DNA, 25 bp, probe
tctaagttacatgacctatatcttt

SEQ ID NO: 280015 - DNA, 25 bp, probe
tctcaatttactaactaccagcatt

SEQ ID NO: 280016 - DNA, 25 bp, probe
tctgcattggatttgtagtaccctt

SEQ ID NO: 280017 - DNA, 25 bp, probe
tctgcttcgagggcaggaaccccat

SEQ ID NO: 280018 - DNA, 25 bp, probe
tctgcttcgagggcaggaaccccat

SEQ ID NO: 280019 - DNA, 25 bp, probe
tctgttttgctggcaatgtttccca

SEQ ID NO: 280020 - DNA, 25 bp, probe
tctgttttgtggctttcagcaccat

SEQ ID NO: 280021 - DNA, 25 bp, probe
tctgtttcttagattctgaccatga

SEQ ID NO: 280022 - DNA, 25 bp, probe
tctgtttcttagattctgaccatga

SEQ ID NO: 280023 - DNA, 25 bp, probe
tctgttatttgaatggattcccatc

SEQ ID NO: 280024 - DNA, 25 bp, probe
tctgttatttgaatggattcccatc

SEQ ID NO: 280025 - DNA, 25 bp, probe
tctgtgttttgaatggtgttgtatg

SEQ ID NO: 280026 - DNA, 25 bp, probe
tctgtgtatattgttgcttattgtt

SEQ ID NO: 280027 - DNA, 25 bp, probe
tctgtgtttatgtttatatactgtt

SEQ ID NO: 280028 - DNA, 25 bp, probe
ttagaccctgttatctactgtttcc

SEQ ID NO: 280029 - DNA, 25 bp, probe
ttagaccctgttatctactgtttcc

SEQ ID NO: 280030 - DNA, 25 bp, probe
tctacagcaccgactattaccgtgt

SEQ ID NO: 280031 - DNA, 25 bp, probe
tcttcaggggctgattatccggtgg

SEQ ID NO: 280032 - DNA, 25 bp, probe
tctgtcaggggcttggatttcgtgt

SEQ ID NO: 280033 - DNA, 25 bp, probe
tctgatcaggggtgctggttttggt

SEQ ID NO: 280034 - DNA, 25 bp, probe
tctgtgcagtggtgaaccattttgg

SEQ ID NO: 280035 - DNA, 25 bp, probe
tctgtgcgcttacccagaattcttg

SEQ ID NO: 280036 - DNA, 25 bp, probe
tctgggctgtgaacaatgatgcttt

SEQ ID NO: 280037 - DNA, 25 bp, probe
tctgggctgtgaacaatgatgcttt

SEQ ID NO: 280038 - DNA, 25 bp, probe
tctgggcatgtcccgatatctggat

SEQ ID NO: 280039 - DNA, 25 bp, probe
tctgcagccaggccttgcaaattga

SEQ ID NO: 280040 - DNA, 25 bp, probe
tctgcagccaggccttgcaaattga

SEQ ID NO: 280041 - DNA, 25 bp, probe
tctgcagcaagttcttgaaattcaa

SEQ ID NO: 280042 - DNA, 25 bp, probe
tctgagaactgatggacaaatgcaa

SEQ ID NO: 280043 - DNA, 25 bp, probe
tctcaaactcctgggctcaagcaat

SEQ ID NO: 280044 - DNA, 25 bp, probe
tctcgaactcctaacctcaagtgat

SEQ ID NO: 280045 - DNA, 25 bp, probe
tctcgaactcctgacctcaggtgat

SEQ ID NO: 280046 - DNA, 25 bp, probe
tctgccaacatcctctgattctagg

SEQ ID NO: 280047 - DNA, 25 bp, probe
tctccaaagctgctgatgtctatgc

SEQ ID NO: 280048 - DNA, 25 bp, probe
tctctaaaggaaattgtacattctt

SEQ ID NO: 280049 - DNA, 25 bp, probe
tctgttgtaggttttgtacagtgtt

SEQ ID NO: 280050 - DNA, 25 bp, probe
tctttgggccagttttacagtgtac

SEQ ID NO: 280051 - DNA, 25 bp, probe
tctgttggtgggtttaggagttaat

SEQ ID NO: 280052 - DNA, 25 bp, probe
tctgtttgtggggtgacgggactca

SEQ ID NO: 280053 - DNA, 25 bp, probe
tctgcttctttgcaggtcgggagaa

SEQ ID NO: 280054 - DNA, 25 bp, probe
tctgcttctttgcaggtcgggagaa

SEQ ID NO: 280055 - DNA, 25 bp, probe
tctgttccctgctgggtgggaatgc

SEQ ID NO: 280056 - DNA, 25 bp, probe
tctgtctccacctgaggcagggaaa

SEQ ID NO: 280057 - DNA, 25 bp, probe
tctgtgactacccaggcagatggga

SEQ ID NO: 280058 - DNA, 25 bp, probe
tctgagccatacagggcacttgaga

SEQ ID NO: 280059 - DNA, 25 bp, probe
tctgactacagaagtggccttgcac

SEQ ID NO: 280060 - DNA, 25 bp, probe
tctgcacgaggagatagccctgcac

SEQ ID NO: 280061 - DNA, 25 bp, probe
tctgcacgaggagatagccctgcac

SEQ ID NO: 280062 - DNA, 25 bp, probe
tctgctctgagttggcaagccaagc

SEQ ID NO: 280063 - DNA, 25 bp, probe
tctgatctggtggatcagactgaag

SEQ ID NO: 280064 - DNA, 25 bp, probe
tctgtcttgtgaatggactgtcagc

SEQ ID NO: 280065 - DNA, 25 bp, probe
tctcctgcattgacaccactgtcaa

SEQ ID NO: 280066 - DNA, 25 bp, probe
tctccagcaggatcacagttacaca

SEQ ID NO: 280067 - DNA, 25 bp, probe
tctccatctgggaatgattaacaca

SEQ ID NO: 280068 - DNA, 25 bp, probe
tctgtcctggtgaagttccactcgg

SEQ ID NO: 280069 - DNA, 25 bp, probe
tctgtccatgttgagctgttcactc

SEQ ID NO: 280070 - DNA, 25 bp, probe
tctgtccatgttgagctgttcactc

SEQ ID NO: 280071 - DNA, 25 bp, probe
tctgatctcttatactgtcatcctg

SEQ ID NO: 280072 - DNA, 25 bp, probe
tctgttcttatgtgccacatccttg

SEQ ID NO: 280073 - DNA, 25 bp, probe
tctgtcttgatttctccaagcactt

SEQ ID NO: 280074 - DNA, 25 bp, probe
tctgtcttgatttctccaagcactt

SEQ ID NO: 280075 - DNA, 25 bp, probe
tctgtcttttttcatatcagtttgg

SEQ ID NO: 280076 - DNA, 25 bp, probe
tctgtccttttttgttaaattgtgg

SEQ ID NO: 280077 - DNA, 25 bp, probe
tttcccttttttgtattatgtgact

SEQ ID NO: 280078 - DNA, 25 bp, probe
ttggctcctttttacttagtaggat

SEQ ID NO: 280079 - DNA, 25 bp, probe
ttgaccctactgtggattggtgggt

SEQ ID NO: 280080 - DNA, 25 bp, probe
tctgaccctttctgtcggagtggtc

SEQ ID NO: 280081 - DNA, 25 bp, probe
tttaatctttgtgacaggaaagccc

SEQ ID NO: 280082 - DNA, 25 bp, probe
ttaaagttgttctcccaagagcttt

SEQ ID NO: 280083 - DNA, 25 bp, probe
tctgaaagctttcaatcttcaagag

SEQ ID NO: 280084 - DNA, 25 bp, probe
tctgtaaattctaatacttgaagtg

SEQ ID NO: 280085 - DNA, 25 bp, probe
tctccaaattttaaggtgaagctgt

SEQ ID NO: 280086 - DNA, 25 bp, probe
tctgccaagcagatgtcaagagtgg

SEQ ID NO: 280087 - DNA, 25 bp, probe
tctcctgtgcagctatagaagtaga

SEQ ID NO: 280088 - DNA, 25 bp, probe
tctgctctgctcgggcaaaacaaga

SEQ ID NO: 280089 - DNA, 25 bp, probe
tctgcagctccaggtacatatcacg

SEQ ID NO: 280090 - DNA, 25 bp, probe
tctgaccaatagtacacacacagac

SEQ ID NO: 280091 - DNA, 25 bp, probe
ttaccgaatagcccagccaatcaac

SEQ ID NO: 280092 - DNA, 25 bp, probe
tctccagaaaatgcaactcaattac

SEQ ID NO: 280093 - DNA, 25 bp, probe
tctccagaaaatgcaactcaattac

SEQ ID NO: 280094 - DNA, 25 bp, probe
tctccaggaacatctactcagcaga

SEQ ID NO: 280095 - DNA, 25 bp, probe
tctccaacgacatcatgctactgca

SEQ ID NO: 280096 - DNA, 25 bp, probe
tctgtgcccagaggagcagtactca

SEQ ID NO: 280097 - DNA, 25 bp, probe
tctgtgcccagaggagcagtactca

SEQ ID NO: 280098 - DNA, 25 bp, probe
tctgtgctctgcaggtggaaagccc

SEQ ID NO: 280099 - DNA, 25 bp, probe
tctgtgtctgcaaggatgagtgggc

SEQ ID NO: 280100 - DNA, 25 bp, probe
tctgtgtctgctgagcaatgtcgtc

SEQ ID NO: 280101 - DNA, 25 bp, probe
tctgtgtctctgagaaggctgctaa

SEQ ID NO: 280102 - DNA, 25 bp, probe
tctgtgctctaataacgatgtatat

SEQ ID NO: 280103 - DNA, 25 bp, probe
tctccttaattaactgggatgatct

SEQ ID NO: 280104 - DNA, 25 bp, probe
tctcctgggtaaattttgatgtcgc

SEQ ID NO: 280105 - DNA, 25 bp, probe
tctcggactgtgaattttggtgatg

SEQ ID NO: 280106 - DNA, 25 bp, probe
tctcttgccatgcacttgtgcggtg

SEQ ID NO: 280107 - DNA, 25 bp, probe
tctcctggaggagtacggctgctgc

SEQ ID NO: 280108 - DNA, 25 bp, probe
tctgttggtgtagatgcgcgtcatc

SEQ ID NO: 280109 - DNA, 25 bp, probe
tctgttggtggacttagctgcctca

SEQ ID NO: 280110 - DNA, 25 bp, probe
tctgtagggagcagtaagcagctgc

SEQ ID NO: 280111 - DNA, 25 bp, probe
tctcctgggacaactagggctgcga

SEQ ID NO: 280112 - DNA, 25 bp, probe
tctcctgttggctcacagggctgaa

SEQ ID NO: 280113 - DNA, 25 bp, probe
tctctcggtgactgccaccgtaggg

SEQ ID NO: 280114 - DNA, 25 bp, probe
tctcctaggagctgtcctggtgggc

SEQ ID NO: 280115 - DNA, 25 bp, probe
tctgctaaggagggacccgtgttgc

SEQ ID NO: 280116 - DNA, 25 bp, probe
tctccaagggggacctctactatgc

SEQ ID NO: 280117 - DNA, 25 bp, probe
tctccaagggggacctctactatgc

SEQ ID NO: 280118 - DNA, 25 bp, probe
tctccaagacggatggcgtttgtga

SEQ ID NO: 280119 - DNA, 25 bp, probe
ttcagcatggaccaagtgggccttg

SEQ ID NO: 280120 - DNA, 25 bp, probe
tctgcctccacaccagtggagtctt

SEQ ID NO: 280121 - DNA, 25 bp, probe
tctgcgcccagtgcacatgttgaat

SEQ ID NO: 280122 - DNA, 25 bp, probe
tctgcccagattgcatactctaaga

SEQ ID NO: 280123 - DNA, 25 bp, probe
tctgccgccagtgatgacggaggag

SEQ ID NO: 280124 - DNA, 25 bp, probe
tctgcctccttcaagagggaggggg

SEQ ID NO: 280125 - DNA, 25 bp, probe
tctgccctcttggagcgcaagaggc

SEQ ID NO: 280126 - DNA, 25 bp, probe
tctgccttctcagggacaagagtag

SEQ ID NO: 280127 - DNA, 25 bp, probe
tctcctttaggcgaactgcgcggtt

SEQ ID NO: 280128 - DNA, 25 bp, probe
tctcgtcaaagggccactgccaagg

SEQ ID NO: 280129 - DNA, 25 bp, probe
tctcgtcaaagggccactgccaagg

SEQ ID NO: 280130 - DNA, 25 bp, probe
tctcttgcataagcctcaggcctgg

SEQ ID NO: 280131 - DNA, 25 bp, probe
tctcctaaacacagcagggctttgg

SEQ ID NO: 280132 - DNA, 25 bp, probe
tctcctacaaccaagacatcgtctt

SEQ ID NO: 280133 - DNA, 25 bp, probe
tctcctacagcgacaagaacctcat

SEQ ID NO: 280134 - DNA, 25 bp, probe
tctctctgaaggactggtaactaaa

SEQ ID NO: 280135 - DNA, 25 bp, probe
tctctctggcaggttgtggaactca

SEQ ID NO: 280136 - DNA, 25 bp, probe
tctgtttgaggcatagagcaactgc

SEQ ID NO: 280137 - DNA, 25 bp, probe
tctgcctgatggccctagacaagcc

SEQ ID NO: 280138 - DNA, 25 bp, probe
tctcctgtgaagatggacggtattt

SEQ ID NO: 280139 - DNA, 25 bp, probe
tctcctagacagggctgagtgggca

SEQ ID NO: 280140 - DNA, 25 bp, probe
tctctcagcccaggtctcctgggca

SEQ ID NO: 280141 - DNA, 25 bp, probe
tctccggctacggcaagcatgaggc

SEQ ID NO: 280142 - DNA, 25 bp, probe
tctctgggctgacaaacaactgcca

SEQ ID NO: 280143 - DNA, 25 bp, probe
tctcgggcatgaccggaaaggccaa

SEQ ID NO: 280144 - DNA, 25 bp, probe
tcatcggcgagtgggtaaaggcagc

SEQ ID NO: 280145 - DNA, 25 bp, probe
tcatcggcgagtgggtaaaggcagc

SEQ ID NO: 280146 - DNA, 25 bp, probe
tctcgcgcgactgagaaccgtgaca

SEQ ID NO: 280147 - DNA, 25 bp, probe
tctcgcttcagcacaagatccggag

SEQ ID NO: 280148 - DNA, 25 bp, probe
tctcgcttcagcacaagatccggag

SEQ ID NO: 280149 - DNA, 25 bp, probe
tctgtctcttgcataagcctcaggc

SEQ ID NO: 280150 - DNA, 25 bp, probe
tctgtctcagctgtccagcgctgag

SEQ ID NO: 280151 - DNA, 25 bp, probe
tctgagtccataaccaggctcagga

SEQ ID NO: 280152 - DNA, 25 bp, probe
tctcacccatatccgaagctgtgga

SEQ ID NO: 280153 - DNA, 25 bp, probe
tctcacccatatccgaagctgtgga

SEQ ID NO: 280154 - DNA, 25 bp, probe
tctcaccccatgcccaatcagggtg

SEQ ID NO: 280155 - DNA, 25 bp, probe
tctccccatctcttcaatggggctg

SEQ ID NO: 280156 - DNA, 25 bp, probe
tctcgctgccaccagaaagggtgtg

SEQ ID NO: 280157 - DNA, 25 bp, probe
tctgctgtcctcaaagacaggacgc

SEQ ID NO: 280158 - DNA, 25 bp, probe
tctgctgtcctcaaagacaggacgc

SEQ ID NO: 280159 - DNA, 25 bp, probe
tctgtactcctcaagcactggaaca

SEQ ID NO: 280160 - DNA, 25 bp, probe
tctgctaattcgagtcatggctaat

SEQ ID NO: 280161 - DNA, 25 bp, probe
tctccagaccgagcctggcttatag

SEQ ID NO: 280162 - DNA, 25 bp, probe
tctccagaccgagcctggcttatag

SEQ ID NO: 280163 - DNA, 25 bp, probe
tctgccagagcagagcagccatggc

SEQ ID NO: 280164 - DNA, 25 bp, probe
tctgcacagatgctgccagctctgg

SEQ ID NO: 280165 - DNA, 25 bp, probe
tctacacatgtggtactctgagctc

SEQ ID NO: 280166 - DNA, 25 bp, probe
tctgatgccttcatctgttcagtca

SEQ ID NO: 280167 - DNA, 25 bp, probe
tctgtcacttccagtgaagtccagg

SEQ ID NO: 280168 - DNA, 25 bp, probe
tctgaattacctggggagtcacgga

SEQ ID NO: 280169 - DNA, 25 bp, probe
tctgaattacctggggagtcacgga

SEQ ID NO: 280170 - DNA, 25 bp, probe
tctgcagtaacggggggacctatac

SEQ ID NO: 280171 - DNA, 25 bp, probe
tctgcacattaagaagggacccttc

SEQ ID NO: 280172 - DNA, 25 bp, probe
tctgccctaatcagaggggccacct

SEQ ID NO: 280173 - DNA, 25 bp, probe
tctgtccttgtcatgatgctggagc

SEQ ID NO: 280174 - DNA, 25 bp, probe
tctgctggcttggcactgattgacc

SEQ ID NO: 280175 - DNA, 25 bp, probe
tctctggctgcatccaattgttgct

SEQ ID NO: 280176 - DNA, 25 bp, probe
tcttgcttccaccaagtgtttgaaa

SEQ ID NO: 280177 - DNA, 25 bp, probe
tcttgcttccaccaagtgtttgaaa

SEQ ID NO: 280178 - DNA, 25 bp, probe
tctttgctctcagaaccttggggaa

SEQ ID NO: 280179 - DNA, 25 bp, probe
tctttgctctcagaaccttggggaa

SEQ ID NO: 280180 - DNA, 25 bp, probe
tcttggagcagaaaccctacgggaa

SEQ ID NO: 280181 - DNA, 25 bp, probe
tctcggtactaagactacagctgga

SEQ ID NO: 280182 - DNA, 25 bp, probe
tctcggtgactgccaccgtagggga

SEQ ID NO: 280183 - DNA, 25 bp, probe
tcatcgttgactctttgcaaaggaa

SEQ ID NO: 280184 - DNA, 25 bp, probe
tctgattctactattggcaagagga

SEQ ID NO: 280185 - DNA, 25 bp, probe
tctctgtctgaacttgggcaaggcg

SEQ ID NO: 280186 - DNA, 25 bp, probe
tctgcagcgttgcttggtgcacaga

SEQ ID NO: 280187 - DNA, 25 bp, probe
tctgcagcgatgcagctggggctgc

SEQ ID NO: 280188 - DNA, 25 bp, probe
tctgctgaatgccgcgatgggtcag

SEQ ID NO: 280189 - DNA, 25 bp, probe
tctgctgactggccgcagtggtagc

SEQ ID NO: 280190 - DNA, 25 bp, probe
tctgctacaggacgcgctggcgaga

SEQ ID NO: 280191 - DNA, 25 bp, probe
tctgcttcatgctacgtgtgggtga

SEQ ID NO: 280192 - DNA, 25 bp, probe
tctgcttcatgctacgtgtgggtga

SEQ ID NO: 280193 - DNA, 25 bp, probe
tctgcttgtcttagatgttggtggt

SEQ ID NO: 280194 - DNA, 25 bp, probe
tctaattttggattccttggtggag

SEQ ID NO: 280195 - DNA, 25 bp, probe
tctgaatctttgtatttgcttttgc

SEQ ID NO: 280196 - DNA, 25 bp, probe
tctgacctgtcgtacatttgtttga

SEQ ID NO: 280197 - DNA, 25 bp, probe
tctgttgatgtgataatttgatttg

SEQ ID NO: 280198 - DNA, 25 bp, probe
tctgttgcacagatctgttttttca

SEQ ID NO: 280199 - DNA, 25 bp, probe
tctgctgtccagaactgaagacttt

SEQ ID NO: 280200 - DNA, 25 bp, probe
tctgcagccacaaagttgagacttc

SEQ ID NO: 280201 - DNA, 25 bp, probe
tctgatgctcactggataacaactc

SEQ ID NO: 280202 - DNA, 25 bp, probe
tatgatgatggcagcggaaatgact

SEQ ID NO: 280203 - DNA, 25 bp, probe
tatgatgatggcagcggaaatgact

SEQ ID NO: 280204 - DNA, 25 bp, probe
tctgctggctcaactgggacatgac

SEQ ID NO: 280205 - DNA, 25 bp, probe
tctgcgccatcagcatcgtatgtga

SEQ ID NO: 280206 - DNA, 25 bp, probe
tctgcagggcagccatcctggatga

SEQ ID NO: 280207 - DNA, 25 bp, probe
tctgatctggcaggcagccaggatc

SEQ ID NO: 280208 - DNA, 25 bp, probe
tctgatctgtgtgtgatctggtcac

SEQ ID NO: 280209 - DNA, 25 bp, probe
tctgatgctgagaggcttgcctccg

SEQ ID NO: 280210 - DNA, 25 bp, probe
tctgatgctgagaggcttgcctccg

SEQ ID NO: 280211 - DNA, 25 bp, probe
tctgcataggttggttcactgccga

SEQ ID NO: 280212 - DNA, 25 bp, probe
tctcaaggcttgcattaccagcccc

SEQ ID NO: 280213 - DNA, 25 bp, probe
tctcaaggcttgcattaccagcccc

SEQ ID NO: 280214 - DNA, 25 bp, probe
tctgcttgactattattaccacata

SEQ ID NO: 280215 - DNA, 25 bp, probe
tctgaatgcctactattatcctgat

SEQ ID NO: 280216 - DNA, 25 bp, probe
tctgaatgcctactattatcctgat

SEQ ID NO: 280217 - DNA, 25 bp, probe
tctgtcagcctaatatgcacactat

SEQ ID NO: 280218 - DNA, 25 bp, probe
tctgtcagcctaatatgcacactat

SEQ ID NO: 280219 - DNA, 25 bp, probe
tctatcaactataagcccactgtta

SEQ ID NO: 280220 - DNA, 25 bp, probe
ttcacaaggttacaacgtgaatgtg

SEQ ID NO: 280221 - DNA, 25 bp, probe
tctccgaagttaaaatctgtaatag

SEQ ID NO: 280222 - DNA, 25 bp, probe
tctcgtgacattaggaaatttagga

SEQ ID NO: 280223 - DNA, 25 bp, probe
tctagagccatttgcatacaattta

SEQ ID NO: 280224 - DNA, 25 bp, probe
tctgaggcagatgagcttacaagta

SEQ ID NO: 280225 - DNA, 25 bp, probe
tctgcagggacgcgtacgagctgca

SEQ ID NO: 280226 - DNA, 25 bp, probe
tctgagggatcactgtgtcattgat

SEQ ID NO: 280227 - DNA, 25 bp, probe
tctgcagaagtcctttcatgtgaat

SEQ ID NO: 280228 - DNA, 25 bp, probe
tctgcagaagtcctttcatgtgaat

SEQ ID NO: 280229 - DNA, 25 bp, probe
tctgatttgtccttttgatgcaaat

SEQ ID NO: 280230 - DNA, 25 bp, probe
tctgaccttcacatttgctctgaag

SEQ ID NO: 280231 - DNA, 25 bp, probe
tctgaccttcacatttgctctgaag

SEQ ID NO: 280232 - DNA, 25 bp, probe
tctgacactttcacttttgcagatt

SEQ ID NO: 280233 - DNA, 25 bp, probe
tctaaaatactctttcttgcagttt

SEQ ID NO: 280234 - DNA, 25 bp, probe
tctgagcacaaagttttaggctgta

SEQ ID NO: 280235 - DNA, 25 bp, probe
tctgccacagaaggctggtgggttt

SEQ ID NO: 280236 - DNA, 25 bp, probe
tctctacgatatggtgtgtggggac

SEQ ID NO: 280237 - DNA, 25 bp, probe
tctctaccaagtctgatgtctgggc

SEQ ID NO: 280238 - DNA, 25 bp, probe
tctgctaccattttggctgtttgga

SEQ ID NO: 280239 - DNA, 25 bp, probe
tctgcagacctggcttggtgatcgg

SEQ ID NO: 280240 - DNA, 25 bp, probe
tctgaacagctgggtgccaaaagtg

SEQ ID NO: 280241 - DNA, 25 bp, probe
tctgcaaatctaaggccaaaagctg

SEQ ID NO: 280242 - DNA, 25 bp, probe
tctgccgaggagcgccaagaagatg

SEQ ID NO: 280243 - DNA, 25 bp, probe
tctgccgaggagcgccaagaagatg

SEQ ID NO: 280244 - DNA, 25 bp, probe
tctgccaggggccgaaggtcaggac

SEQ ID NO: 280245 - DNA, 25 bp, probe
tctgccaggggccgaaggtcaggac

SEQ ID NO: 280246 - DNA, 25 bp, probe
tctgcccgagggcaggagtagggca

SEQ ID NO: 280247 - DNA, 25 bp, probe
tctgaccgggctgcattgtgtatgg

SEQ ID NO: 280248 - DNA, 25 bp, probe
tctgatttgtggtctatttaattac

SEQ ID NO: 280249 - DNA, 25 bp, probe
tctgatttgtggtctatttaattac

SEQ ID NO: 280250 - DNA, 25 bp, probe
tctcgtggatagttcatggtaattt

SEQ ID NO: 280251 - DNA, 25 bp, probe
tctgagtgacggatatgtgaaattt

SEQ ID NO: 280252 - DNA, 25 bp, probe
tctagggtgggttggaaaatctcca

SEQ ID NO: 280253 - DNA, 25 bp, probe
tctatacctggctcataaaaccctc

SEQ ID NO: 280254 - DNA, 25 bp, probe
tctcaggtggcctctgaaacaccac

SEQ ID NO: 280255 - DNA, 25 bp, probe
tctcgggggcagacgtcagaatccg

SEQ ID NO: 280256 - DNA, 25 bp, probe
tctcggctgggaacccgacatcaag

SEQ ID NO: 280257 - DNA, 25 bp, probe
tctcggctgggaacccgacatcaag

SEQ ID NO: 280258 - DNA, 25 bp, probe
tctcgaatggaatacgtgcactcaa

SEQ ID NO: 280259 - DNA, 25 bp, probe
tctcgaatggagtctaatggtcaag

SEQ ID NO: 280260 - DNA, 25 bp, probe
tctcagacatgttgagaatcatgga

SEQ ID NO: 280261 - DNA, 25 bp, probe
tctccgatgtggcagtcagtaacca

SEQ ID NO: 280262 - DNA, 25 bp, probe
tcttggtgtggaaccattacgccca

SEQ ID NO: 280263 - DNA, 25 bp, probe
tctcagaccttaaccttacaggccc

SEQ ID NO: 280264 - DNA, 25 bp, probe
tctctgtccatgatgcactgttaga

SEQ ID NO: 280265 - DNA, 25 bp, probe
tctcttcgtctttgagcagcagtgc

SEQ ID NO: 280266 - DNA, 25 bp, probe
tctcagtcagatactgcgcaagaat

SEQ ID NO: 280267 - DNA, 25 bp, probe
tctcgtagttcccaaactcatggaa

SEQ ID NO: 280268 - DNA, 25 bp, probe
tctgttagttcaccaaaaacatata

SEQ ID NO: 280269 - DNA, 25 bp, probe
tctgttatttcctaatcaaaaaggt

SEQ ID NO: 280270 - DNA, 25 bp, probe
tcttacttccctctcacagaaaagt

SEQ ID NO: 280271 - DNA, 25 bp, probe
tcttacttccctctcacagaaaagt

SEQ ID NO: 280272 - DNA, 25 bp, probe
tctctactaccacaaggaaaatagt

SEQ ID NO: 280273 - DNA, 25 bp, probe
ttccaacacccctgaaattcatagt

SEQ ID NO: 280274 - DNA, 25 bp, probe
taaaaccttccatgtcaagattcag

SEQ ID NO: 280275 - DNA, 25 bp, probe
tcaaatacattgcgaagtctagaaa

SEQ ID NO: 280276 - DNA, 25 bp, probe
taattaactgggatgatctcattaa

SEQ ID NO: 280277 - DNA, 25 bp, probe
taatttacttggacaacttcgtagg

SEQ ID NO: 280278 - DNA, 25 bp, probe
tctcagtgtacttgttcctattgcc

SEQ ID NO: 280279 - DNA, 25 bp, probe
tctcttgagacttattcgctactac

SEQ ID NO: 280280 - DNA, 25 bp, probe
tctgttgctgccatttccagttatc

SEQ ID NO: 280281 - DNA, 25 bp, probe
tctgatttcggcctgtccaggtatg

SEQ ID NO: 280282 - DNA, 25 bp, probe
tctgcattccggggtgtatgtgtgg

SEQ ID NO: 280283 - DNA, 25 bp, probe
tctatcccggctttggtgcggggta

SEQ ID NO: 280284 - DNA, 25 bp, probe
tctacacccgcatcaggggagggat

SEQ ID NO: 280285 - DNA, 25 bp, probe
tcatgaccactcacacgtgggggga

SEQ ID NO: 280286 - DNA, 25 bp, probe
tctgagccccttgctggcaagtggt

SEQ ID NO: 280287 - DNA, 25 bp, probe
tctgatgctcccttgaagccataga

SEQ ID NO: 280288 - DNA, 25 bp, probe
tctcagtgcactttgaacctggaaa

SEQ ID NO: 280289 - DNA, 25 bp, probe
tctgcattcctgatgaccaatggga

SEQ ID NO: 280290 - DNA, 25 bp, probe
tctgcatccctgagcaggctgtgtg

SEQ ID NO: 280291 - DNA, 25 bp, probe
tctgacctgctgaaagggatgcttg

SEQ ID NO: 280292 - DNA, 25 bp, probe
tctgagctccatcaaggctgacatc

SEQ ID NO: 280293 - DNA, 25 bp, probe
tctccactcagatagcgcatgaacc

SEQ ID NO: 280294 - DNA, 25 bp, probe
tctccccagcaagtgctggacccca

SEQ ID NO: 280295 - DNA, 25 bp, probe
tctccggggagacagatctctcaaa

SEQ ID NO: 280296 - DNA, 25 bp, probe
tcttctgggctacactatctaacat

SEQ ID NO: 280297 - DNA, 25 bp, probe
tctcctagacaagactcgctacaca

SEQ ID NO: 280298 - DNA, 25 bp, probe
tctcactggacagtggtgcccgacg

SEQ ID NO: 280299 - DNA, 25 bp, probe
tctcactggacagtggtgcccgacg

SEQ ID NO: 280300 - DNA, 25 bp, probe
tctgcagagaactggaacctgcctg

SEQ ID NO: 280301 - DNA, 25 bp, probe
tctgaggccaagggacagctttcgc

SEQ ID NO: 280302 - DNA, 25 bp, probe
tctcagaccacaccgtcggtgtcct

SEQ ID NO: 280303 - DNA, 25 bp, probe
tctcagacccggaatccagtgggca

SEQ ID NO: 280304 - DNA, 25 bp, probe
tcttagcctcgggatccagtgaagc

SEQ ID NO: 280305 - DNA, 25 bp, probe
tctgctcaggctggggtccagtggg

SEQ ID NO: 280306 - DNA, 25 bp, probe
tctctgacatcgttggtccggatgg

SEQ ID NO: 280307 - DNA, 25 bp, probe
tctctgagcggttggtgccgggtat

SEQ ID NO: 280308 - DNA, 25 bp, probe
tctgctgtcggaaagcgacgtggtg

SEQ ID NO: 280309 - DNA, 25 bp, probe
tctgctgtcggaaagcgacgtggtg

SEQ ID NO: 280310 - DNA, 25 bp, probe
tctgctgtttgaagcgcagcaggtg

SEQ ID NO: 280311 - DNA, 25 bp, probe
tctgagttggcaagccaagccccat

SEQ ID NO: 280312 - DNA, 25 bp, probe
tctgatgaggccagcgagagctccc

SEQ ID NO: 280313 - DNA, 25 bp, probe
tctgagtgacctgctgggtcatccc

SEQ ID NO: 280314 - DNA, 25 bp, probe
tctgagtgacctgctgggtcatccc

SEQ ID NO: 280315 - DNA, 25 bp, probe
tctgatcaacactctggttaccttg

SEQ ID NO: 280316 - DNA, 25 bp, probe
tctcatcaactctgtgcaattgtcc

SEQ ID NO: 280317 - DNA, 25 bp, probe
tctgatatactgtgtgcttgtttta

SEQ ID NO: 280318 - DNA, 25 bp, probe
tctgcaaagtctgagcaggttttga

SEQ ID NO: 280319 - DNA, 25 bp, probe
tctagattgcctcacagttgtttgt

SEQ ID NO: 280320 - DNA, 25 bp, probe
tctaattgtagttatattttctgtg

SEQ ID NO: 280321 - DNA, 25 bp, probe
tctccaagtcgacacttttcctgat

SEQ ID NO: 280322 - DNA, 25 bp, probe
tctccagaatggtgcctgtttctct

SEQ ID NO: 280323 - DNA, 25 bp, probe
tctccagaagtgcagcctttgttat

SEQ ID NO: 280324 - DNA, 25 bp, probe
tctccgccagtgccaacttagagtt

SEQ ID NO: 280325 - DNA, 25 bp, probe
tctccgccagtgccaacttagagtt

SEQ ID NO: 280326 - DNA, 25 bp, probe
tctcctcaagttctcgctagatgtc

SEQ ID NO: 280327 - DNA, 25 bp, probe
tctcctcaagttctcgctagatgtc

SEQ ID NO: 280328 - DNA, 25 bp, probe
tctcctcaagttctcgctagatgtc

SEQ ID NO: 280329 - DNA, 25 bp, probe
tctcatgccaacacttctgtaattg

SEQ ID NO: 280330 - DNA, 25 bp, probe
tctctgccaagctcttctgtttggc

SEQ ID NO: 280331 - DNA, 25 bp, probe
tctctgaatagtgtgtatgtgttgg

SEQ ID NO: 280332 - DNA, 25 bp, probe
tctgctactggcgttttgtgtggat

SEQ ID NO: 280333 - DNA, 25 bp, probe
tctgcatcatcactagctagttttc

SEQ ID NO: 280334 - DNA, 25 bp, probe
tctgagacagatactagatattttg

SEQ ID NO: 280335 - DNA, 25 bp, probe
tctgctgagtgtgctaaatactggg

SEQ ID NO: 280336 - DNA, 25 bp, probe
tctgctgagtgtgctaaatactggg

SEQ ID NO: 280337 - DNA, 25 bp, probe
tctctgagactgctaagtaggggca

SEQ ID NO: 280338 - DNA, 25 bp, probe
tctgcgagaagggcgaggagtggga

SEQ ID NO: 280339 - DNA, 25 bp, probe
tctgcagaatgggccactgtagggg

SEQ ID NO: 280340 - DNA, 25 bp, probe
tctgatcatagaacaccttaggaag

SEQ ID NO: 280341 - DNA, 25 bp, probe
tctgatcaaagcaccttgaatggaa

SEQ ID NO: 280342 - DNA, 25 bp, probe
tctgataaagattgcctgtggtgaa

SEQ ID NO: 280343 - DNA, 25 bp, probe
tctgaacacacatgccattgcgctg

SEQ ID NO: 280344 - DNA, 25 bp, probe
ttaatgaatcatcggcttggtactg

SEQ ID NO: 280345 - DNA, 25 bp, probe
ttaatgaatcatcggcttggtactg

SEQ ID NO: 280346 - DNA, 25 bp, probe
tctgaagaactgtggctggaaaatg

SEQ ID NO: 280347 - DNA, 25 bp, probe
tctgcaaatacatgtcctggatcaa

SEQ ID NO: 280348 - DNA, 25 bp, probe
tctgcaaatacatgtcctggatcaa

SEQ ID NO: 280349 - DNA, 25 bp, probe
tctgcacagcaagctgtcggtgatc

SEQ ID NO: 280350 - DNA, 25 bp, probe
tctgaatgcatgacctttggtacat

SEQ ID NO: 280351 - DNA, 25 bp, probe
tctgaagatagccagttcctctcat

SEQ ID NO: 280352 - DNA, 25 bp, probe
tctaagctcacaagatacccacttt

SEQ ID NO: 280353 - DNA, 25 bp, probe
tctccctgcagcaaatctccaaaat

SEQ ID NO: 280354 - DNA, 25 bp, probe
tctccctgcagaaacatctccagaa

SEQ ID NO: 280355 - DNA, 25 bp, probe
tctccctgcagaaacatctccagaa

SEQ ID NO: 280356 - DNA, 25 bp, probe
tctgccctggaacctaccagagcag

SEQ ID NO: 280357 - DNA, 25 bp, probe
tctccttgtaagccttgaagaagta

SEQ ID NO: 280358 - DNA, 25 bp, probe
tctcccccacacctgatggaagaaa

SEQ ID NO: 280359 - DNA, 25 bp, probe
tctcgccgccaatgcttgttcaggc

SEQ ID NO: 280360 - DNA, 25 bp, probe
tctgcgagggcatggcctatctgca

SEQ ID NO: 280361 - DNA, 25 bp, probe
tctcaggcggcattggcgataccag

SEQ ID NO: 280362 - DNA, 25 bp, probe
tctgcaggggctttgagcacgccag

SEQ ID NO: 280363 - DNA, 25 bp, probe
tctgcaggggctttgagcacgccag

SEQ ID NO: 280364 - DNA, 25 bp, probe
tctgcgcaaaccatgagatcccaca

SEQ ID NO: 280365 - DNA, 25 bp, probe
tctcaggacacaagtggctgcccaa

SEQ ID NO: 280366 - DNA, 25 bp, probe
tctgcataacaaaggcatcgcccac

SEQ ID NO: 280367 - DNA, 25 bp, probe
tctctgacacaaactgttcacccat

SEQ ID NO: 280368 - DNA, 25 bp, probe
tctgcagctataaattttgaaccat

SEQ ID NO: 280369 - DNA, 25 bp, probe
tctgcacgagcaagtttctcattac

SEQ ID NO: 280370 - DNA, 25 bp, probe
tctgcacgagcaagtttctcattac

SEQ ID NO: 280371 - DNA, 25 bp, probe
tctgcagtatctggcttgtccatct

SEQ ID NO: 280372 - DNA, 25 bp, probe
tctgacttcatgattgtggcatcca

SEQ ID NO: 280373 - DNA, 25 bp, probe
tctgacttggtatatgctcatctga

SEQ ID NO: 280374 - DNA, 25 bp, probe
tctgactgggttaagccatctttct

SEQ ID NO: 280375 - DNA, 25 bp, probe
tctgcaatgccaattacagccatct

SEQ ID NO: 280376 - DNA, 25 bp, probe
tctgaagcagtatacatgcctttgg

SEQ ID NO: 280377 - DNA, 25 bp, probe
tctgctcaatgataacatctctttc

SEQ ID NO: 280378 - DNA, 25 bp, probe
tctgagcattagatttctcatttgc

SEQ ID NO: 280379 - DNA, 25 bp, probe
tctgcacccatgttttcttattcaa

SEQ ID NO: 280380 - DNA, 25 bp, probe
tctgcacgctttatgccttcaatac

SEQ ID NO: 280381 - DNA, 25 bp, probe
tctgcacgctcaatgcccagtaaaa

SEQ ID NO: 280382 - DNA, 25 bp, probe
tctgcacgctcaatgcccagtaaaa

SEQ ID NO: 280383 - DNA, 25 bp, probe
tctgactgcagcgtcactcaggaaa

SEQ ID NO: 280384 - DNA, 25 bp, probe
tctgactcaactgccaggtgaaaaa

SEQ ID NO: 280385 - DNA, 25 bp, probe
tctctccatgcacctacagggaaaa

SEQ ID NO: 280386 - DNA, 25 bp, probe
tctccctcatgagtaagactgaaat

SEQ ID NO: 280387 - DNA, 25 bp, probe
tctccaccagcacaaatcgaagcag

SEQ ID NO: 280388 - DNA, 25 bp, probe
tctcccaacacacactcagatagca

SEQ ID NO: 280389 - DNA, 25 bp, probe
tctccacagacctcactgtgctgaa

SEQ ID NO: 280390 - DNA, 25 bp, probe
tctccacagacctcactgtgctgaa

SEQ ID NO: 280391 - DNA, 25 bp, probe
tctccaagcaaagccatatggagca

SEQ ID NO: 280392 - DNA, 25 bp, probe
tctgcacagacttagaccttcagga

SEQ ID NO: 280393 - DNA, 25 bp, probe
tctcaagcactggggcctgtacgag

SEQ ID NO: 280394 - DNA, 25 bp, probe
tctccaccgagcggcgtgtaagagt

SEQ ID NO: 280395 - DNA, 25 bp, probe
tctccaccgagcggcgtgtaggagt

SEQ ID NO: 280396 - DNA, 25 bp, probe
tctccctcaggggcaggtggtggag

SEQ ID NO: 280397 - DNA, 25 bp, probe
tctacccctgggcttttggattatg

SEQ ID NO: 280398 - DNA, 25 bp, probe
tcttccttcagacggttttggatct

SEQ ID NO: 280399 - DNA, 25 bp, probe
tttccctaaagaccctaaatctgag

SEQ ID NO: 280400 - DNA, 25 bp, probe
ttaccttaaggacactaaatattca

SEQ ID NO: 280401 - DNA, 25 bp, probe
ttactcttacagggacccaaataca

SEQ ID NO: 280402 - DNA, 25 bp, probe
tctactttatccagaaccaggcacc

SEQ ID NO: 280403 - DNA, 25 bp, probe
tctgccacttcccaggtaagcagga

SEQ ID NO: 280404 - DNA, 25 bp, probe
tctgccacttcccaggtaagcagga

SEQ ID NO: 280405 - DNA, 25 bp, probe
tctaacttcccagggggcaggcact

SEQ ID NO: 280406 - DNA, 25 bp, probe
tcatcaacttctatcgggccattga

SEQ ID NO: 280407 - DNA, 25 bp, probe
tctgcctgtattttcggactttgac

SEQ ID NO: 280408 - DNA, 25 bp, probe
tctctattatctctgtctactattc

SEQ ID NO: 280409 - DNA, 25 bp, probe
tctctgtctactattccttgattgc

SEQ ID NO: 280410 - DNA, 25 bp, probe
tcttttactttaaatccattggaag

SEQ ID NO: 280411 - DNA, 25 bp, probe
tctttgtccttcactatactactga

SEQ ID NO: 280412 - DNA, 25 bp, probe
tcttacccttcaatgttaaatctac

SEQ ID NO: 280413 - DNA, 25 bp, probe
tcttacccttcaatgttaaatctac

SEQ ID NO: 280414 - DNA, 25 bp, probe
tcttcccgttttatttatctacaat

SEQ ID NO: 280415 - DNA, 25 bp, probe
tcttcccgttttatttatctacaat

SEQ ID NO: 280416 - DNA, 25 bp, probe
tttactaactttatgtgttaccaat

SEQ ID NO: 280417 - DNA, 25 bp, probe
tttattcgacgatgcttggcctacc

SEQ ID NO: 280418 - DNA, 25 bp, probe
tttctttacgagagggtctcaccca

SEQ ID NO: 280419 - DNA, 25 bp, probe
tcttttccacccagggtatcagccg

SEQ ID NO: 280420 - DNA, 25 bp, probe
tcttttccacccaaggtatcagccg

SEQ ID NO: 280421 - DNA, 25 bp, probe
tcttttccacccaaggtatcagccg

SEQ ID NO: 280422 - DNA, 25 bp, probe
tctcttttcaacttagtttactggc

SEQ ID NO: 280423 - DNA, 25 bp, probe
tctgcttcattggtcactttttttt

SEQ ID NO: 280424 - DNA, 25 bp, probe
tctgcttttccattctgggtgtttt

SEQ ID NO: 280425 - DNA, 25 bp, probe
tctgctgctgtcctcaacatggagg

SEQ ID NO: 280426 - DNA, 25 bp, probe
tctgctgcctccaagtcatgggaga

SEQ ID NO: 280427 - DNA, 25 bp, probe
tctgctgctgaagaggcggaagaaa

SEQ ID NO: 280428 - DNA, 25 bp, probe
tctgctgccaatgggtcggacaaca

SEQ ID NO: 280429 - DNA, 25 bp, probe
tctgctgccaatgggtcggacaaca

SEQ ID NO: 280430 - DNA, 25 bp, probe
tctctccttctggcgcaagagaaca

SEQ ID NO: 280431 - DNA, 25 bp, probe
tctccatcccctggcagaatgagat

SEQ ID NO: 280432 - DNA, 25 bp, probe
tctccatcccctggcagaatgagat

SEQ ID NO: 280433 - DNA, 25 bp, probe
tctacatcccctggaagtacaagga

SEQ ID NO: 280434 - DNA, 25 bp, probe
tctgcacatccggatagaagattcc

SEQ ID NO: 280435 - DNA, 25 bp, probe
tctccattctggagaatctgctcca

SEQ ID NO: 280436 - DNA, 25 bp, probe
tcatcctttggatacttcttttaag

SEQ ID NO: 280437 - DNA, 25 bp, probe
tctcctactaactagcttcttatct

SEQ ID NO: 280438 - DNA, 25 bp, probe
tctgcccttaaatgctgtatgcttt

SEQ ID NO: 280439 - DNA, 25 bp, probe
tctgcccttgtatctttgcagtcat

SEQ ID NO: 280440 - DNA, 25 bp, probe
tctcctggtgtctacatgtttgctt

SEQ ID NO: 280441 - DNA, 25 bp, probe
tctcctttgtcaaatggtatttttt

SEQ ID NO: 280442 - DNA, 25 bp, probe
tctccttttggcttatgtgattttc

SEQ ID NO: 280443 - DNA, 25 bp, probe
tctccttcatgtttaatggcacctc

SEQ ID NO: 280444 - DNA, 25 bp, probe
tctcctacatgtattgctgctactt

SEQ ID NO: 280445 - DNA, 25 bp, probe
tctcctggctggatgggtttggact

SEQ ID NO: 280446 - DNA, 25 bp, probe
tctccagtctggagtcagaagtgtg

SEQ ID NO: 280447 - DNA, 25 bp, probe
tctccgtcttttcagaagtgctgtc

SEQ ID NO: 280448 - DNA, 25 bp, probe
tctccgctgcttttggaaagtcaga

SEQ ID NO: 280449 - DNA, 25 bp, probe
tctccgctgcttttggaaagtcaga

SEQ ID NO: 280450 - DNA, 25 bp, probe
tctcccatctagtggaaatgagcga

SEQ ID NO: 280451 - DNA, 25 bp, probe
tctccctcataattccagagaaggg

SEQ ID NO: 280452 - DNA, 25 bp, probe
tctaccttcaatgccacgactggca

SEQ ID NO: 280453 - DNA, 25 bp, probe
taattttattcccagcacagtcaca

SEQ ID NO: 280454 - DNA, 25 bp, probe
tcattttctgcatttaaccgtcaat

SEQ ID NO: 280455 - DNA, 25 bp, probe
tcttttctagtttccctggatttca

SEQ ID NO: 280456 - DNA, 25 bp, probe
tctttcctagctaaccctagatatg

SEQ ID NO: 280457 - DNA, 25 bp, probe
tctctgctcctacacacacaaaaga

SEQ ID NO: 280458 - DNA, 25 bp, probe
tctctccctcaccaaaaacaaaaag

SEQ ID NO: 280459 - DNA, 25 bp, probe
tctgcttctctcacctaaaaaaaga

SEQ ID NO: 280460 - DNA, 25 bp, probe
tctgcttccttaggttacaaaacaa

SEQ ID NO: 280461 - DNA, 25 bp, probe
tctgctccttaaggttaacaattcc

SEQ ID NO: 280462 - DNA, 25 bp, probe
tcttccctgggggtcaccaattcaa

SEQ ID NO: 280463 - DNA, 25 bp, probe
tctgctgaccagctaaacaccaatt

SEQ ID NO: 280464 - DNA, 25 bp, probe
tctgctttgtgactaaatacaaact

SEQ ID NO: 280465 - DNA, 25 bp, probe
tctgctgtgtgtgtgtatatataaa

SEQ ID NO: 280466 - DNA, 25 bp, probe
tctgctgtgctggagatcatcttta

SEQ ID NO: 280467 - DNA, 25 bp, probe
tctgcgtctgagatctctctgcata

SEQ ID NO: 280468 - DNA, 25 bp, probe
tctctgagctggatctagccttctg

SEQ ID NO: 280469 - DNA, 25 bp, probe
tctcatgggccaactaatcttctgt

SEQ ID NO: 280470 - DNA, 25 bp, probe
tctcatgggccaactaatcttctgt

SEQ ID NO: 280471 - DNA, 25 bp, probe
tctgcatcttccactattttcaatg

SEQ ID NO: 280472 - DNA, 25 bp, probe
tctgaattcttggatattacttatg

SEQ ID NO: 280473 - DNA, 25 bp, probe
tctgctttcttgggttaatccatgt

SEQ ID NO: 280474 - DNA, 25 bp, probe
tctgctttcactggagagtaacact

SEQ ID NO: 280475 - DNA, 25 bp, probe
tctccatatcctggggtaaagattg

SEQ ID NO: 280476 - DNA, 25 bp, probe
tctccttatctgtgcagtacaggtt

SEQ ID NO: 280477 - DNA, 25 bp, probe
tctcttctattcacagtacacgtca

SEQ ID NO: 280478 - DNA, 25 bp, probe
tctctcaggagtatcttacctgtaa

SEQ ID NO: 280479 - DNA, 25 bp, probe
tctctgcaccgtcttgtagcatggt

SEQ ID NO: 280480 - DNA, 25 bp, probe
tctctgctccgttttgtacagtcac

SEQ ID NO: 280481 - DNA, 25 bp, probe
tctcattcgagatgtcttacttccc

SEQ ID NO: 280482 - DNA, 25 bp, probe
tctcatggagagatgtctgttctaa

SEQ ID NO: 280483 - DNA, 25 bp, probe
tctgctgcagagaatggttttcagg

SEQ ID NO: 280484 - DNA, 25 bp, probe
tctgctcatgagatggtatcagcca

SEQ ID NO: 280485 - DNA, 25 bp, probe
tctgccatctgcaaagttcagcagt

SEQ ID NO: 280486 - DNA, 25 bp, probe
tctgcagactgctagtgttctgtct

SEQ ID NO: 280487 - DNA, 25 bp, probe
tctgcactctacttgtgctgtgtgc

SEQ ID NO: 280488 - DNA, 25 bp, probe
tctgcctcaatcttttgcaagccca

SEQ ID NO: 280489 - DNA, 25 bp, probe
tctgcctcacatagcttacaagcca

SEQ ID NO: 280490 - DNA, 25 bp, probe
tctgccatacatgttaatattctac

SEQ ID NO: 280491 - DNA, 25 bp, probe
tctgctccttgtcctaatattcata

SEQ ID NO: 280492 - DNA, 25 bp, probe
tctccactctgtccatcagatacta

SEQ ID NO: 280493 - DNA, 25 bp, probe
tctccctcattgtcatcatgtatgg

SEQ ID NO: 280494 - DNA, 25 bp, probe
tctgccatgtcatttatgatgtata

SEQ ID NO: 280495 - DNA, 25 bp, probe
tctgcctgtcacaatatattctcaa

SEQ ID NO: 280496 - DNA, 25 bp, probe
tctgcctgtcacaatatattctcaa

SEQ ID NO: 280497 - DNA, 25 bp, probe
tctgcctggcagaatcacagtctca

SEQ ID NO: 280498 - DNA, 25 bp, probe
tctcctgacatgtctcacagacgct

SEQ ID NO: 280499 - DNA, 25 bp, probe
tctccatatcgagtcatcacctctg

SEQ ID NO: 280500 - DNA, 25 bp, probe
tctgcacaattgatgtctacatggt

SEQ ID NO: 280501 - DNA, 25 bp, probe
tctgcaagactcatcgccaaagcat

SEQ ID NO: 280502 - DNA, 25 bp, probe
tctgcttgatcaattcccttgaata

SEQ ID NO: 280503 - DNA, 25 bp, probe
tctgctactcacatttttggtagtg

SEQ ID NO: 280504 - DNA, 25 bp, probe
tctgctacattcagttcttgtgtcg

SEQ ID NO: 280505 - DNA, 25 bp, probe
tctgccctttagaatggcttgtccc

SEQ ID NO: 280506 - DNA, 25 bp, probe
tctcacctttaaatggcacaaccag

SEQ ID NO: 280507 - DNA, 25 bp, probe
ttaaatcgtcaaactagaaccagga

SEQ ID NO: 280508 - DNA, 25 bp, probe
ttaaatcgtcaaactagaaccagga

SEQ ID NO: 280509 - DNA, 25 bp, probe
ttgggattggtatctggaaaaggaa

SEQ ID NO: 280510 - DNA, 25 bp, probe
tcttcgttggctcccgtgtaaaaga

SEQ ID NO: 280511 - DNA, 25 bp, probe
tcttcgttggctcccgtgtaaaaga

SEQ ID NO: 280512 - DNA, 25 bp, probe
tctctagttgaaccctgggaacaat

SEQ ID NO: 280513 - DNA, 25 bp, probe
tcatctgcagtaacggggggaccta

SEQ ID NO: 280514 - DNA, 25 bp, probe
tctcggtgaacgtggaggactgtga

SEQ ID NO: 280515 - DNA, 25 bp, probe
tctcggtgaacgtggaggactgtga

SEQ ID NO: 280516 - DNA, 25 bp, probe
tctccgtgaacctgctgaagaggca

SEQ ID NO: 280517 - DNA, 25 bp, probe
tctgccgtgaagcacatgcatgaaa

SEQ ID NO: 280518 - DNA, 25 bp, probe
tctgccggacgcgagcagatgaacg

SEQ ID NO: 280519 - DNA, 25 bp, probe
tctctctggatccggaagaatcata

SEQ ID NO: 280520 - DNA, 25 bp, probe
tctcacagtgacaggaaggtatggc

SEQ ID NO: 280521 - DNA, 25 bp, probe
tctcacagtgacaggaaggtatggc

SEQ ID NO: 280522 - DNA, 25 bp, probe
tctccagatctcagtaaggtacgga

SEQ ID NO: 280523 - DNA, 25 bp, probe
tctcctttccttttgtctacggaag

SEQ ID NO: 280524 - DNA, 25 bp, probe
tctcctttctcttacgcttaaggct

SEQ ID NO: 280525 - DNA, 25 bp, probe
tctcccttattctccatgtgaaact

SEQ ID NO: 280526 - DNA, 25 bp, probe
tctccgtacgattgtctctgaaaca

SEQ ID NO: 280527 - DNA, 25 bp, probe
tctctactacacaggcctgataact

SEQ ID NO: 280528 - DNA, 25 bp, probe
tctctgaagaactgtggctggaaaa

SEQ ID NO: 280529 - DNA, 25 bp, probe
tctctaggaacgaaggtggaaatac

SEQ ID NO: 280530 - DNA, 25 bp, probe
tcttcaagaaggaggctgagcacaa

SEQ ID NO: 280531 - DNA, 25 bp, probe
tctccatcagggctggcaggacaaa

SEQ ID NO: 280532 - DNA, 25 bp, probe
tctttatggaggaagcatggaagaa

SEQ ID NO: 280533 - DNA, 25 bp, probe
tctcttctgtagggagcagtaagca

SEQ ID NO: 280534 - DNA, 25 bp, probe
tctccactgtgaagggcgtcaatct

SEQ ID NO: 280535 - DNA, 25 bp, probe
tctctcctggatcagggtggatcat

SEQ ID NO: 280536 - DNA, 25 bp, probe
tctcctgcttcacagggtcgactgt

SEQ ID NO: 280537 - DNA, 25 bp, probe
tctgcctgaccactgggtgtggacg

SEQ ID NO: 280538 - DNA, 25 bp, probe
tctgccatccggaagaggtggcacc

SEQ ID NO: 280539 - DNA, 25 bp, probe
tctgcagatcaccgaccaggtgtcc

SEQ ID NO: 280540 - DNA, 25 bp, probe
tctgcagacacttcccaagtgtctg

SEQ ID NO: 280541 - DNA, 25 bp, probe
tctctgaacttggcgtcgatgtaga

SEQ ID NO: 280542 - DNA, 25 bp, probe
tctctgaagctgggctgtccttcaa

SEQ ID NO: 280543 - DNA, 25 bp, probe
tctctgaagctgggctgtccttcaa

SEQ ID NO: 280544 - DNA, 25 bp, probe
tctctgacgctcgcaggactgaaga

SEQ ID NO: 280545 - DNA, 25 bp, probe
tctgcgaccatcgtcatgttaacaa

SEQ ID NO: 280546 - DNA, 25 bp, probe
tctgctgcccctgcagttggcagaa

SEQ ID NO: 280547 - DNA, 25 bp, probe
tcatgtgacaccttaccggagtaaa

SEQ ID NO: 280548 - DNA, 25 bp, probe
tcatgcttacactgatacagggaaa

SEQ ID NO: 280549 - DNA, 25 bp, probe
tctgcctgccactgtcagggttaag

SEQ ID NO: 280550 - DNA, 25 bp, probe
tctctgtgtcccttagggcttatca

SEQ ID NO: 280551 - DNA, 25 bp, probe
tctctctgaatcctaagggctggtc

SEQ ID NO: 280552 - DNA, 25 bp, probe
tctctcggaagccaccgtgtggttc

SEQ ID NO: 280553 - DNA, 25 bp, probe
tctccacaaaggccctggtggtttc

SEQ ID NO: 280554 - DNA, 25 bp, probe
tctccaagaacatccgagtttcttc

SEQ ID NO: 280555 - DNA, 25 bp, probe
tctccaagtgtttaccactttctgt

SEQ ID NO: 280556 - DNA, 25 bp, probe
tctcaaaggctttagccctggaccc

SEQ ID NO: 280557 - DNA, 25 bp, probe
tctcccaactcattagctcctgggc

SEQ ID NO: 280558 - DNA, 25 bp, probe
tctccccaggcattggatctgctgg

SEQ ID NO: 280559 - DNA, 25 bp, probe
tctccccaggcattggatctgctgg

SEQ ID NO: 280560 - DNA, 25 bp, probe
tctccccaggcattggatctgctgg

SEQ ID NO: 280561 - DNA, 25 bp, probe
tctccccaggcattggatctgctgg

SEQ ID NO: 280562 - DNA, 25 bp, probe
tctccccaggcattggatctgctgg

SEQ ID NO: 280563 - DNA, 25 bp, probe
tctccccaggcattggatctgctgg

SEQ ID NO: 280564 - DNA, 25 bp, probe
tctgcctccaccaagaaatcatgag

SEQ ID NO: 280565 - DNA, 25 bp, probe
tctcccacacggactacatcaatgg

SEQ ID NO: 280566 - DNA, 25 bp, probe
tctcccacacggactacatcaatgg

SEQ ID NO: 280567 - DNA, 25 bp, probe
tctcatccacactgccacaatgcag

SEQ ID NO: 280568 - DNA, 25 bp, probe
tctgcatccacctatgtaacaaggc

SEQ ID NO: 280569 - DNA, 25 bp, probe
tctcatcatctctgttatacacctg

SEQ ID NO: 280570 - DNA, 25 bp, probe
tctcatatgtctatccaacacaccc

SEQ ID NO: 280571 - DNA, 25 bp, probe
tcttgagtgctggtcaaatcagaac

SEQ ID NO: 280572 - DNA, 25 bp, probe
tctcagagtgcttctaatcatcaca

SEQ ID NO: 280573 - DNA, 25 bp, probe
tctgcatggtattggaataactcac

SEQ ID NO: 280574 - DNA, 25 bp, probe
tctgcatcctcttggatctggactc

SEQ ID NO: 280575 - DNA, 25 bp, probe
tctgcatcctcttggatctggactc

SEQ ID NO: 280576 - DNA, 25 bp, probe
tctcacgtcgcagtgccatggacgc

SEQ ID NO: 280577 - DNA, 25 bp, probe
tctcctgactggtgctgcagcaccg

SEQ ID NO: 280578 - DNA, 25 bp, probe
tctccatcgtggactgggcacgcag

SEQ ID NO: 280579 - DNA, 25 bp, probe
tctctgcctatgggatgggcccagc

SEQ ID NO: 280580 - DNA, 25 bp, probe
tctctgcctatgggatgggcccagc

SEQ ID NO: 280581 - DNA, 25 bp, probe
tctcgagagagggtgctggcccagc

SEQ ID NO: 280582 - DNA, 25 bp, probe
tctcgggagatctttctcagccagc

SEQ ID NO: 280583 - DNA, 25 bp, probe
tctcgggagatctttctcagccagc

SEQ ID NO: 280584 - DNA, 25 bp, probe
tctctgttgagagcatttcagccag

SEQ ID NO: 280585 - DNA, 25 bp, probe
tctgctttgtgaggcagtcttgttc

SEQ ID NO: 280586 - DNA, 25 bp, probe
tctgctggggatggccactgtgaat

SEQ ID NO: 280587 - DNA, 25 bp, probe
tctgctatgtgacttgcatcgtgga

SEQ ID NO: 280588 - DNA, 25 bp, probe
tctgcattgtcactgttgactgtgg

SEQ ID NO: 280589 - DNA, 25 bp, probe
tctgctggtcgacctgacagtagag

SEQ ID NO: 280590 - DNA, 25 bp, probe
tctgctggggtcgtgcacagggacc

SEQ ID NO: 280591 - DNA, 25 bp, probe
tctcatggggaggcgcgagggcagg

SEQ ID NO: 280592 - DNA, 25 bp, probe
tctctgagtgtagcagggccaggaa

SEQ ID NO: 280593 - DNA, 25 bp, probe
tctctgtttacctgcctaggaaaac

SEQ ID NO: 280594 - DNA, 25 bp, probe
tctctgtttactttctaagaactaa

SEQ ID NO: 280595 - DNA, 25 bp, probe
tctctgttgtaggttttgtacagtg

SEQ ID NO: 280596 - DNA, 25 bp, probe
tctccttgtaggggtctctcagagg

SEQ ID NO: 280597 - DNA, 25 bp, probe
tctcctattgaaacttgcccagatg

SEQ ID NO: 280598 - DNA, 25 bp, probe
tctacgaatgcactacattaaagat

SEQ ID NO: 280599 - DNA, 25 bp, probe
tctccgagtcactcatgtgcaaaat

SEQ ID NO: 280600 - DNA, 25 bp, probe
tctccagagtacccagctattaata

SEQ ID NO: 280601 - DNA, 25 bp, probe
tcacaagcgtacctcctattttatg

SEQ ID NO: 280602 - DNA, 25 bp, probe
tcaccattataggtactctatttga

SEQ ID NO: 280603 - DNA, 25 bp, probe
tcattttatacgtttttttgagatg

SEQ ID NO: 280604 - DNA, 25 bp, probe
tctagttctacgggtttgattattt

SEQ ID NO: 280605 - DNA, 25 bp, probe
tctaaacttggcagtttctaacttg

SEQ ID NO: 280606 - DNA, 25 bp, probe
tctaagtctgatttagtttcatcaa

SEQ ID NO: 280607 - DNA, 25 bp, probe
tctcaatggctacgtcaagttctca

SEQ ID NO: 280608 - DNA, 25 bp, probe
tcatccagttaaccaaatggccaag

SEQ ID NO: 280609 - DNA, 25 bp, probe
tctccattctaacctgactggcaca

SEQ ID NO: 280610 - DNA, 25 bp, probe
tctccaatgtcaactgctgcctgga

SEQ ID NO: 280611 - DNA, 25 bp, probe
tctccaatgtcaactgctgcctgga

SEQ ID NO: 280612 - DNA, 25 bp, probe
tctcaaagatcagcagtgtagatga

SEQ ID NO: 280613 - DNA, 25 bp, probe
tctctagagtcagtcattatgaaat

SEQ ID NO: 280614 - DNA, 25 bp, probe
tctgctgagcttcgtcaaagaattc

SEQ ID NO: 280615 - DNA, 25 bp, probe
tattgacttttatgaagtttcccct

SEQ ID NO: 280616 - DNA, 25 bp, probe
ttaacttttctagaatccaccctct

SEQ ID NO: 280617 - DNA, 25 bp, probe
tctaacttttcaagccaatccctta

SEQ ID NO: 280618 - DNA, 25 bp, probe
tcttttatgttcacaccaccacatt

SEQ ID NO: 280619 - DNA, 25 bp, probe
tctatttattgtaccaaagacagtg

SEQ ID NO: 280620 - DNA, 25 bp, probe
tctcgtttctcttggacaagcacag

SEQ ID NO: 280621 - DNA, 25 bp, probe
tctcagataactcagtacagatagc

SEQ ID NO: 280622 - DNA, 25 bp, probe
tctagataacttggctcagctgtat

SEQ ID NO: 280623 - DNA, 25 bp, probe
tctagataacttggctcagctgtat

SEQ ID NO: 280624 - DNA, 25 bp, probe
tctagctattcttcgtcgtgagatg

SEQ ID NO: 280625 - DNA, 25 bp, probe
tctcagatttcatcatccgagcatt

SEQ ID NO: 280626 - DNA, 25 bp, probe
tctcatcctagatcaccgaggttat

SEQ ID NO: 280627 - DNA, 25 bp, probe
tctatcccaatacgcacctttgtat

SEQ ID NO: 280628 - DNA, 25 bp, probe
tctaccctaatttcactggagtgac

SEQ ID NO: 280629 - DNA, 25 bp, probe
tctcgtggctactttcacttcagag

SEQ ID NO: 280630 - DNA, 25 bp, probe
tctcctgttccatttcagttcagtt

SEQ ID NO: 280631 - DNA, 25 bp, probe
tctgcctatttattggggtgcctat

SEQ ID NO: 280632 - DNA, 25 bp, probe
tctcctacgtcaaggccgtggacat

SEQ ID NO: 280633 - DNA, 25 bp, probe
tctcccacgctctgttggtggactt

SEQ ID NO: 280634 - DNA, 25 bp, probe
tctctccatctgtttggtgggggta

SEQ ID NO: 280635 - DNA, 25 bp, probe
tctccagcatggctctggggggcat

SEQ ID NO: 280636 - DNA, 25 bp, probe
tctcctcatgctgtttagtgatggc

SEQ ID NO: 280637 - DNA, 25 bp, probe
tctcctcatgaggttttctgatgtg

SEQ ID NO: 280638 - DNA, 25 bp, probe
tctgctctctgattttcttcattgt

SEQ ID NO: 280639 - DNA, 25 bp, probe
tctctgtactgtatgctgtcattgt

SEQ ID NO: 280640 - DNA, 25 bp, probe
tctgctgttctgatatctccagacc

SEQ ID NO: 280641 - DNA, 25 bp, probe
tctgctgttctgatatctccagacc

SEQ ID NO: 280642 - DNA, 25 bp, probe
tctctgattctgtcaatgtcttgaa

SEQ ID NO: 280643 - DNA, 25 bp, probe
tctctgattttcttcattgtgcaaa

SEQ ID NO: 280644 - DNA, 25 bp, probe
tctcatttttcagtacttctacaga

SEQ ID NO: 280645 - DNA, 25 bp, probe
tctcataatcaaatatcgctttaca

SEQ ID NO: 280646 - DNA, 25 bp, probe
tctctcttactaacagtttcatctg

SEQ ID NO: 280647 - DNA, 25 bp, probe
tctctggagccttggagttctttgc

SEQ ID NO: 280648 - DNA, 25 bp, probe
tctctggcaccaggggtttcctgag

SEQ ID NO: 280649 - DNA, 25 bp, probe
tctctggcaccaggggtttcctgag

SEQ ID NO: 280650 - DNA, 25 bp, probe
tctcagcgccgagtggacttttgca

SEQ ID NO: 280651 - DNA, 25 bp, probe
tctccgccttcattgactggattga

SEQ ID NO: 280652 - DNA, 25 bp, probe
tctctctgcctagtctacagtactg

SEQ ID NO: 280653 - DNA, 25 bp, probe
tctccagctctactttatgtcctga

SEQ ID NO: 280654 - DNA, 25 bp, probe
tctgccagcccactgttgtatacgc

SEQ ID NO: 280655 - DNA, 25 bp, probe
tctccacctcagccttggataatgc

SEQ ID NO: 280656 - DNA, 25 bp, probe
tctcctcgcaagctgggtaatcgat

SEQ ID NO: 280657 - DNA, 25 bp, probe
tctccaagcaggtggtggccatcgt

SEQ ID NO: 280658 - DNA, 25 bp, probe
tcttcaagacttcaggtgccaggct

SEQ ID NO: 280659 - DNA, 25 bp, probe
tcttcacctttgaccgtacaggtac

SEQ ID NO: 280660 - DNA, 25 bp, probe
tctcaactgcccaccgtagggaagc

SEQ ID NO: 280661 - DNA, 25 bp, probe
tctcagttgtacaccgctttggaaa

SEQ ID NO: 280662 - DNA, 25 bp, probe
tctgcgtttactcttgttttcaaag

SEQ ID NO: 280663 - DNA, 25 bp, probe
tctctttctaatcttgctggtttca

SEQ ID NO: 280664 - DNA, 25 bp, probe
tctctttctaatcttgctggtttca

SEQ ID NO: 280665 - DNA, 25 bp, probe
tcagttcttaacttttcagggtcta

SEQ ID NO: 280666 - DNA, 25 bp, probe
tcagttcttaacttttcagggtcta

SEQ ID NO: 280667 - DNA, 25 bp, probe
ttttcagtagtgtgattaggcgtta

SEQ ID NO: 280668 - DNA, 25 bp, probe
taagccagtacttcaattacgggtt

SEQ ID NO: 280669 - DNA, 25 bp, probe
taaccagtagctgatcttaaggctt

SEQ ID NO: 280670 - DNA, 25 bp, probe
tcaaccagtaaattttattgctgtt

SEQ ID NO: 280671 - DNA, 25 bp, probe
tctccggtaagattttattggtgtt

SEQ ID NO: 280672 - DNA, 25 bp, probe
tcttccggaaatacttttgggatag

SEQ ID NO: 280673 - DNA, 25 bp, probe
tctcccgatgaaaacatatcttttg

SEQ ID NO: 280674 - DNA, 25 bp, probe
tcatcccatcacacaactttttttg

SEQ ID NO: 280675 - DNA, 25 bp, probe
tctgcccttcagaagactcgttttt

SEQ ID NO: 280676 - DNA, 25 bp, probe
tctccagcttctgcagtgcattgtt

SEQ ID NO: 280677 - DNA, 25 bp, probe
tctccactatcttcaggatgccgtc

SEQ ID NO: 280678 - DNA, 25 bp, probe
tctgccctcattactgggccttagt

SEQ ID NO: 280679 - DNA, 25 bp, probe
tctgccaactacatgtgtccttagt

SEQ ID NO: 280680 - DNA, 25 bp, probe
tctctaaggagaatggcccagtcct

SEQ ID NO: 280681 - DNA, 25 bp, probe
tctctggagctgaggacccagcctc

SEQ ID NO: 280682 - DNA, 25 bp, probe
tctcagagagcgaggacgacaccga

SEQ ID NO: 280683 - DNA, 25 bp, probe
tctcaaacagtcctgactcacaggg

SEQ ID NO: 280684 - DNA, 25 bp, probe
tctccaacagctcctggaactgcga

SEQ ID NO: 280685 - DNA, 25 bp, probe
tctccaacagctcctggaactgcga

SEQ ID NO: 280686 - DNA, 25 bp, probe
tctcacaaagtgcggcaagcccagc

SEQ ID NO: 280687 - DNA, 25 bp, probe
tctctcgtagttcccaaactcatgg

SEQ ID NO: 280688 - DNA, 25 bp, probe
tcttgttgagttctatagagccttc

SEQ ID NO: 280689 - DNA, 25 bp, probe
tctctttggctgaacatcgagaggc

SEQ ID NO: 280690 - DNA, 25 bp, probe
tcttttggggtagatgcggccccga

SEQ ID NO: 280691 - DNA, 25 bp, probe
tcttcttggggacgtatgtggccgt

SEQ ID NO: 280692 - DNA, 25 bp, probe
tctacttggggaaatcaggtgcagc

SEQ ID NO: 280693 - DNA, 25 bp, probe
tctccctgcggagacatatcaggcg

SEQ ID NO: 280694 - DNA, 25 bp, probe
tctccctgtgccagaagatcgagca

SEQ ID NO: 280695 - DNA, 25 bp, probe
tctccctgtgccagaagatcgagca

SEQ ID NO: 280696 - DNA, 25 bp, probe
tctcccctgtcaatgagaatcagat

SEQ ID NO: 280697 - DNA, 25 bp, probe
tctgccacctgcaacaaggctctga

SEQ ID NO: 280698 - DNA, 25 bp, probe
tctgccacgtgcacaagctggagag

SEQ ID NO: 280699 - DNA, 25 bp, probe
tctccaagctgagcacgctcgtgga

SEQ ID NO: 280700 - DNA, 25 bp, probe
tctccaagctgagcacgctcgtgga

SEQ ID NO: 280701 - DNA, 25 bp, probe
tctatcggctgatgcagcgctgctg

SEQ ID NO: 280702 - DNA, 25 bp, probe
tctatcggctgatgcagcgctgctg

SEQ ID NO: 280703 - DNA, 25 bp, probe
tctacggttgcaaactgctgaccac

SEQ ID NO: 280704 - DNA, 25 bp, probe
tctaccaggagctcaactaccgctc

SEQ ID NO: 280705 - DNA, 25 bp, probe
tctaccaggacaccagtgaatccct

SEQ ID NO: 280706 - DNA, 25 bp, probe
tcataccgacaacatctgaaaggac

SEQ ID NO: 280707 - DNA, 25 bp, probe
tctacctagcaaaattaacaataca

SEQ ID NO: 280708 - DNA, 25 bp, probe
tctatcccactaaccaaaatacctc

SEQ ID NO: 280709 - DNA, 25 bp, probe
tctatcccactaaccaaaatacctc

SEQ ID NO: 280710 - DNA, 25 bp, probe
tctttagcatccaccaattttcact

SEQ ID NO: 280711 - DNA, 25 bp, probe
tctctttcatctagctccataattg

SEQ ID NO: 280712 - DNA, 25 bp, probe
tctctttcatctagctccataattg

SEQ ID NO: 280713 - DNA, 25 bp, probe
tctccctgctcaatgcattccaggt

SEQ ID NO: 280714 - DNA, 25 bp, probe
tctcccttcatttgtctctggtggg

SEQ ID NO: 280715 - DNA, 25 bp, probe
tctcctcctattttacttgaggctg

SEQ ID NO: 280716 - DNA, 25 bp, probe
tctccatcctttttgttatatggga

SEQ ID NO: 280717 - DNA, 25 bp, probe
tttgcccgttcagctttatgggatt

SEQ ID NO: 280718 - DNA, 25 bp, probe
tcttgccttttcacggtagtggtcc

SEQ ID NO: 280719 - DNA, 25 bp, probe
tttccttgtaacagggtgaagccct

SEQ ID NO: 280720 - DNA, 25 bp, probe
ttctactttaacagggtatgctgcc

SEQ ID NO: 280721 - DNA, 25 bp, probe
tctacagccttaacgagggctacgc

SEQ ID NO: 280722 - DNA, 25 bp, probe
tctacagctttctcggggagacctt

SEQ ID NO: 280723 - DNA, 25 bp, probe
tctcaacgagttcccagaggaactt

SEQ ID NO: 280724 - DNA, 25 bp, probe
tctccaagtgacccggagggacttt

SEQ ID NO: 280725 - DNA, 25 bp, probe
tcaccggcaacaccaagagggtttt

SEQ ID NO: 280726 - DNA, 25 bp, probe
tctccctcaagaacacaaacgtttt

SEQ ID NO: 280727 - DNA, 25 bp, probe
tctccctcaagaacacaaacgtttt

SEQ ID NO: 280728 - DNA, 25 bp, probe
tctactccaagaaaccaacgctgag

SEQ ID NO: 280729 - DNA, 25 bp, probe
ttagtccatagaggtccctggctac

SEQ ID NO: 280730 - DNA, 25 bp, probe
ttattccacaagggccccgtgatca

SEQ ID NO: 280731 - DNA, 25 bp, probe
tctaccaccaaggatgccctagatg

SEQ ID NO: 280732 - DNA, 25 bp, probe
tctacatacaagacttcaccataag

SEQ ID NO: 280733 - DNA, 25 bp, probe
tctataaaaacgtcgcacatgcaga

SEQ ID NO: 280734 - DNA, 25 bp, probe
tctaagcaaagtgcccctgcaggcg

SEQ ID NO: 280735 - DNA, 25 bp, probe
tctcaggcacagcatgacctcctga

SEQ ID NO: 280736 - DNA, 25 bp, probe
tctcaggcgcagcgcctcgcgaacg

SEQ ID NO: 280737 - DNA, 25 bp, probe
tctcagggagcgacctgggcaaaga

SEQ ID NO: 280738 - DNA, 25 bp, probe
tctcagattgcaggtctcattggaa

SEQ ID NO: 280739 - DNA, 25 bp, probe
tctcagactatgttcccctgaaaat

SEQ ID NO: 280740 - DNA, 25 bp, probe
tctccgctatgaactccttgaagaa

SEQ ID NO: 280741 - DNA, 25 bp, probe
tctacttcataagtcaatccaagaa

SEQ ID NO: 280742 - DNA, 25 bp, probe
tctcattggcaatgtttcgatagac

SEQ ID NO: 280743 - DNA, 25 bp, probe
tctcatggctcattggtttcggcaa

SEQ ID NO: 280744 - DNA, 25 bp, probe
tctcagagcatctggctgtttagca

SEQ ID NO: 280745 - DNA, 25 bp, probe
tctcagcatccaggagggcttcatc

SEQ ID NO: 280746 - DNA, 25 bp, probe
tctcgcagtgcagtggtgcggtaat

SEQ ID NO: 280747 - DNA, 25 bp, probe
tctctgtgtcaggggacagcttgtg

SEQ ID NO: 280748 - DNA, 25 bp, probe
tctctgagtccaccagaagttgtgc

SEQ ID NO: 280749 - DNA, 25 bp, probe
tctccatgtccaggaaacttgtaac

SEQ ID NO: 280750 - DNA, 25 bp, probe
tctcctgtccaatgacatgtgtgct

SEQ ID NO: 280751 - DNA, 25 bp, probe
tctcagcgtaaagcaatccatgctt

SEQ ID NO: 280752 - DNA, 25 bp, probe
tctcacaatgaaacggactctgctt

SEQ ID NO: 280753 - DNA, 25 bp, probe
tctcagctataaattgcgctctcag

SEQ ID NO: 280754 - DNA, 25 bp, probe
tctcactgagctttgatgagcctca

SEQ ID NO: 280755 - DNA, 25 bp, probe
tcatcaatgagttgggtgccatcaa

SEQ ID NO: 280756 - DNA, 25 bp, probe
tctccagggagggctgccattcatt

SEQ ID NO: 280757 - DNA, 25 bp, probe
tctccgcagtgagggtgtcagctct

SEQ ID NO: 280758 - DNA, 25 bp, probe
tctcctggatcagggtggatcatgt

SEQ ID NO: 280759 - DNA, 25 bp, probe
tctcagctggaatggttgtatatgc

SEQ ID NO: 280760 - DNA, 25 bp, probe
tctcagtgttacagcatcattaatg

SEQ ID NO: 280761 - DNA, 25 bp, probe
tctctttatacaagcatgcccaatc

SEQ ID NO: 280762 - DNA, 25 bp, probe
tctctgcctgtactgaagctgaaat

SEQ ID NO: 280763 - DNA, 25 bp, probe
tctctctctctactgagctgtaaca

SEQ ID NO: 280764 - DNA, 25 bp, probe
tctctctctctactgagctgtaaca

SEQ ID NO: 280765 - DNA, 25 bp, probe
tctcctttactgaatgtaagggggg

SEQ ID NO: 280766 - DNA, 25 bp, probe
tctcttttagctatgaaccagggca

SEQ ID NO: 280767 - DNA, 25 bp, probe
tctcttttagctatgaaccagggca

SEQ ID NO: 280768 - DNA, 25 bp, probe
tcttgtgacaagagctacccagggc

SEQ ID NO: 280769 - DNA, 25 bp, probe
tttgtgaactgcagggacgcggggc

SEQ ID NO: 280770 - DNA, 25 bp, probe
tcagctctaacggggacaacgggac

SEQ ID NO: 280771 - DNA, 25 bp, probe
tatccttcacaggggacccgttgat

SEQ ID NO: 280772 - DNA, 25 bp, probe
tctccctgtgcggggacgtgggtga

SEQ ID NO: 280773 - DNA, 25 bp, probe
tctccctggccaaggagggctactg

SEQ ID NO: 280774 - DNA, 25 bp, probe
tctacctggccagtggagtggtcca

SEQ ID NO: 280775 - DNA, 25 bp, probe
tctcctgatggccagctgatgagcc

SEQ ID NO: 280776 - DNA, 25 bp, probe
tctctctgcatgagctcatgatcca

SEQ ID NO: 280777 - DNA, 25 bp, probe
tctccttcacaggatgcatcatgca

SEQ ID NO: 280778 - DNA, 25 bp, probe
tctccatgtacacgctcagcaggga

SEQ ID NO: 280779 - DNA, 25 bp, probe
tctccactgaatcgctggactgtga

SEQ ID NO: 280780 - DNA, 25 bp, probe
tctacatcgtcatggagcttgtgca

SEQ ID NO: 280781 - DNA, 25 bp, probe
tctacagccgcatcggcggagacca

SEQ ID NO: 280782 - DNA, 25 bp, probe
tctacagtctcatcggcaggaagct

SEQ ID NO: 280783 - DNA, 25 bp, probe
tctccaggccgagggcagagatgga

SEQ ID NO: 280784 - DNA, 25 bp, probe
tctccaggagcgtgacactggtgat

SEQ ID NO: 280785 - DNA, 25 bp, probe
tctccaggagcgtgacactggtgat

SEQ ID NO: 280786 - DNA, 25 bp, probe
tctccggagctgatagcactctcga

SEQ ID NO: 280787 - DNA, 25 bp, probe
tctccgggttattgctgtcggcagg

SEQ ID NO: 280788 - DNA, 25 bp, probe
tctcctacctctacctgtgaggagg

SEQ ID NO: 280789 - DNA, 25 bp, probe
tctcctacactctcattgtagtagc

SEQ ID NO: 280790 - DNA, 25 bp, probe
tctcctcaaaatgtttggataccgc

SEQ ID NO: 280791 - DNA, 25 bp, probe
tctagacaaaatgattcgaaaccca

SEQ ID NO: 280792 - DNA, 25 bp, probe
tctaacctcagtgggattgaaaccc

SEQ ID NO: 280793 - DNA, 25 bp, probe
tctccctctcaggggtagcagagac

SEQ ID NO: 280794 - DNA, 25 bp, probe
tctcctgtcccaggattagcagagt

SEQ ID NO: 280795 - DNA, 25 bp, probe
tctcgcaccccaggaacatatgcag

SEQ ID NO: 280796 - DNA, 25 bp, probe
tctccagcaactgggatgacgacag

SEQ ID NO: 280797 - DNA, 25 bp, probe
tctcctctgacttcaacagcgacac

SEQ ID NO: 280798 - DNA, 25 bp, probe
tctcctgcttcatagccatgctgga

SEQ ID NO: 280799 - DNA, 25 bp, probe
tctcctcatctctaacagctcagga

SEQ ID NO: 280800 - DNA, 25 bp, probe
tctccatcatcctcagtgtgagtcc

SEQ ID NO: 280801 - DNA, 25 bp, probe
tctcctatccagcctgttgggaatg

SEQ ID NO: 280802 - DNA, 25 bp, probe
tctcactaggcatgtcttgggaatt

SEQ ID NO: 280803 - DNA, 25 bp, probe
tctccataggccactagggcctctt

SEQ ID NO: 280804 - DNA, 25 bp, probe
tctaccaactgtttagggccctgat

SEQ ID NO: 280805 - DNA, 25 bp, probe
tctaccaactgtttagggccctgat

SEQ ID NO: 280806 - DNA, 25 bp, probe
tctaccaactgtttagggccctgat

SEQ ID NO: 280807 - DNA, 25 bp, probe
tctcaacaacgtcacgggcatcgta

SEQ ID NO: 280808 - DNA, 25 bp, probe
tctcaacaacgtcacgggcatcgta

SEQ ID NO: 280809 - DNA, 25 bp, probe
tctaaaagaatatggcgtcatgcgt

SEQ ID NO: 280810 - DNA, 25 bp, probe
tctctctcaaagaatgaggcctcca

SEQ ID NO: 280811 - DNA, 25 bp, probe
tctctcaaagaatgaggcctccaaa

SEQ ID NO: 280812 - DNA, 25 bp, probe
tctctctaaggagaatggcccagtc

SEQ ID NO: 280813 - DNA, 25 bp, probe
tctcttggcaatcagaaggctgccg

SEQ ID NO: 280814 - DNA, 25 bp, probe
tctctctggcgactggaaagtttcc

SEQ ID NO: 280815 - DNA, 25 bp, probe
tctctctggcgactggaaagtttcc

SEQ ID NO: 280816 - DNA, 25 bp, probe
tcttttggcagcaaacaaccttccc

SEQ ID NO: 280817 - DNA, 25 bp, probe
ttttttcagcgagcagacaaaccac

SEQ ID NO: 280818 - DNA, 25 bp, probe
tattttgtcagcaaccggaaaccaa

SEQ ID NO: 280819 - DNA, 25 bp, probe
tcatttgcttcaagccccgaaacac

SEQ ID NO: 280820 - DNA, 25 bp, probe
tctttgcaaaggacctcaggggaca

SEQ ID NO: 280821 - DNA, 25 bp, probe
tctttgcaaaggacctcaggggaca

SEQ ID NO: 280822 - DNA, 25 bp, probe
tctcttcagaaccctatctgggaga

SEQ ID NO: 280823 - DNA, 25 bp, probe
tctcctccagaggacggcagagggt

SEQ ID NO: 280824 - DNA, 25 bp, probe
tctcctgcgggagcggaaatgcagt

SEQ ID NO: 280825 - DNA, 25 bp, probe
tctccttctggcgcaagagaacatt

SEQ ID NO: 280826 - DNA, 25 bp, probe
tctcctcctgcggaagcagtgacct

SEQ ID NO: 280827 - DNA, 25 bp, probe
tctcaatcctcgtatagcgtatgac

SEQ ID NO: 280828 - DNA, 25 bp, probe
tctccatctgtgagatgaggctagc

SEQ ID NO: 280829 - DNA, 25 bp, probe
tctccatggtgtctgagtgcctgtt

SEQ ID NO: 280830 - DNA, 25 bp, probe
tctctcagtgtacttgttcctattg

SEQ ID NO: 280831 - DNA, 25 bp, probe
tctctagcataatttgtattgaaat

SEQ ID NO: 280832 - DNA, 25 bp, probe
tctctagataagtgtcatatatttg

SEQ ID NO: 280833 - DNA, 25 bp, probe
tctctttgcacatgggcatcatttt

SEQ ID NO: 280834 - DNA, 25 bp, probe
tctcccaacatcctgcgtatatttg

SEQ ID NO: 280835 - DNA, 25 bp, probe
tctcctcagatctttggtttttgct

SEQ ID NO: 280836 - DNA, 25 bp, probe
tctcacttgaagatggttttccagt

SEQ ID NO: 280837 - DNA, 25 bp, probe
ttcagtcggaacaaagtttccagtc

SEQ ID NO: 280838 - DNA, 25 bp, probe
tctcattaataagaagattactccc

SEQ ID NO: 280839 - DNA, 25 bp, probe
tctcttaataggtggcactacccca

SEQ ID NO: 280840 - DNA, 25 bp, probe
tctttgtccgtgcgagactacgacc

SEQ ID NO: 280841 - DNA, 25 bp, probe
tcttggtctactgtgaactcttacc

SEQ ID NO: 280842 - DNA, 25 bp, probe
tcttggttcctcggagtacttaaca

SEQ ID NO: 280843 - DNA, 25 bp, probe
tcttggttcctcggagtacttaaca

SEQ ID NO: 280844 - DNA, 25 bp, probe
tctatggtccccgtagctattttaa

SEQ ID NO: 280845 - DNA, 25 bp, probe
tctttggtccacccatgtttgtgta

SEQ ID NO: 280846 - DNA, 25 bp, probe
tctaggcttccagtctgtgtttggt

SEQ ID NO: 280847 - DNA, 25 bp, probe
tctatggggctcttgctctaatgtc

SEQ ID NO: 280848 - DNA, 25 bp, probe
tctcactgggctacatgccctatcc

SEQ ID NO: 280849 - DNA, 25 bp, probe
tctactggccatgatgccactgaac

SEQ ID NO: 280850 - DNA, 25 bp, probe
tctcaggacactgatccactggctc

SEQ ID NO: 280851 - DNA, 25 bp, probe
tctcaggacactgatccactggctc

SEQ ID NO: 280852 - DNA, 25 bp, probe
tctcatggaattggcctattggcaa

SEQ ID NO: 280853 - DNA, 25 bp, probe
tctcaggaaaacccattggcagata

SEQ ID NO: 280854 - DNA, 25 bp, probe
tctagtgggaccttgactggagaaa

SEQ ID NO: 280855 - DNA, 25 bp, probe
tctactgtatgaactgctgacggga

SEQ ID NO: 280856 - DNA, 25 bp, probe
tctactgtatgaactgctgacggga

SEQ ID NO: 280857 - DNA, 25 bp, probe
tctaatcctcaactgtacatgtgta

SEQ ID NO: 280858 - DNA, 25 bp, probe
tctcctctctacttctaagagataa

SEQ ID NO: 280859 - DNA, 25 bp, probe
tctcctactgccttccagaatgtta

SEQ ID NO: 280860 - DNA, 25 bp, probe
tctcttatcctttcccaacattagg

SEQ ID NO: 280861 - DNA, 25 bp, probe
tctctttcctactcctattaaagaa

SEQ ID NO: 280862 - DNA, 25 bp, probe
tctcttggttgagacacaaatgaag

SEQ ID NO: 280863 - DNA, 25 bp, probe
tctctttgactatatcacagagaag

SEQ ID NO: 280864 - DNA, 25 bp, probe
tctctgcctgtctttgtcacaaaat

SEQ ID NO: 280865 - DNA, 25 bp, probe
tctctgcctgtctttgtcacaaaat

SEQ ID NO: 280866 - DNA, 25 bp, probe
tctctgcaacttgttgagcaacatt

SEQ ID NO: 280867 - DNA, 25 bp, probe
tctcctggtctggtgtatgcaaatt

SEQ ID NO: 280868 - DNA, 25 bp, probe
tctcctgctgattgtgtgtgtgaaa

SEQ ID NO: 280869 - DNA, 25 bp, probe
tctctctgccaatgtgatgtataaa

SEQ ID NO: 280870 - DNA, 25 bp, probe
tctctgcatccctggtgtgtaagat

SEQ ID NO: 280871 - DNA, 25 bp, probe
tctctgcacacagcttttgcttagt

SEQ ID NO: 280872 - DNA, 25 bp, probe
tctcccacactctacttatttgttg

SEQ ID NO: 280873 - DNA, 25 bp, probe
tctccccaacataattatttcatta

SEQ ID NO: 280874 - DNA, 25 bp, probe
tcatcaaccattagtttatttttag

SEQ ID NO: 280875 - DNA, 25 bp, probe
tcactaccttttgttcagttggaga

SEQ ID NO: 280876 - DNA, 25 bp, probe
tcttacctctttaggtcactgatgg

SEQ ID NO: 280877 - DNA, 25 bp, probe
tctcagactctttttgtacctggtg

SEQ ID NO: 280878 - DNA, 25 bp, probe
tctagttctaaaagtacttgaggta

SEQ ID NO: 280879 - DNA, 25 bp, probe
tctagttctaaaagtacttgaggta

SEQ ID NO: 280880 - DNA, 25 bp, probe
tcattgggaaaggtgtacttaggta

SEQ ID NO: 280881 - DNA, 25 bp, probe
tcattgggaaaggtgtacttaggta

SEQ ID NO: 280882 - DNA, 25 bp, probe
tcatttggggaggtgtacaagggga

SEQ ID NO: 280883 - DNA, 25 bp, probe
tctactgggtggatgtgaaacggga

SEQ ID NO: 280884 - DNA, 25 bp, probe
tctacttgggagcgggaagaggaga

SEQ ID NO: 280885 - DNA, 25 bp, probe
tctacctggatgtcctgggctaggg

SEQ ID NO: 280886 - DNA, 25 bp, probe
tctagcctcgagtccgaggtatgac

SEQ ID NO: 280887 - DNA, 25 bp, probe
tctagtccggacttgctgtgtatat

SEQ ID NO: 280888 - DNA, 25 bp, probe
tctagtccggacttgctgtgtatat

SEQ ID NO: 280889 - DNA, 25 bp, probe
tctagtggggaatggactcatatgc

SEQ ID NO: 280890 - DNA, 25 bp, probe
tctagtggggaatggactcatatgc

SEQ ID NO: 280891 - DNA, 25 bp, probe
tctagcccaggactcagaacacaac

SEQ ID NO: 280892 - DNA, 25 bp, probe
tctaagccaggcctggaagtccaag

SEQ ID NO: 280893 - DNA, 25 bp, probe
tctagaggtgcccttggcaggaccg

SEQ ID NO: 280894 - DNA, 25 bp, probe
tctagggtgtagctgggtacatatt

SEQ ID NO: 280895 - DNA, 25 bp, probe
tctagggatggacttggttcctctt

SEQ ID NO: 280896 - DNA, 25 bp, probe
tctagttgtggacttttccccattg

SEQ ID NO: 280897 - DNA, 25 bp, probe
tcttgacgggagcattggcccctga

SEQ ID NO: 280898 - DNA, 25 bp, probe
tcttgacgggagcattggcccctga

SEQ ID NO: 280899 - DNA, 25 bp, probe
tcttgacaatggggtcaggccccag

SEQ ID NO: 280900 - DNA, 25 bp, probe
tctattactgggaccaggacccacc

SEQ ID NO: 280901 - DNA, 25 bp, probe
tctctgtcactgttcccggaagcac

SEQ ID NO: 280902 - DNA, 25 bp, probe
tctctgtccatgatgcactgttaga

SEQ ID NO: 280903 - DNA, 25 bp, probe
tctctctcctttacgagacgaaaag

SEQ ID NO: 280904 - DNA, 25 bp, probe
tctttccttttgcaacaagacaaag

SEQ ID NO: 280905 - DNA, 25 bp, probe
tctctggctctttccaaactagaaa

SEQ ID NO: 280906 - DNA, 25 bp, probe
tctctggctctttccaaactagaaa

SEQ ID NO: 280907 - DNA, 25 bp, probe
tctctgggcatgtcccgatatctgg

SEQ ID NO: 280908 - DNA, 25 bp, probe
tcttcaggcggtagctgattctgga

SEQ ID NO: 280909 - DNA, 25 bp, probe
tcttcaggcggtagctgattctgga

SEQ ID NO: 280910 - DNA, 25 bp, probe
tcttacggggccagtcatgtgaagc

SEQ ID NO: 280911 - DNA, 25 bp, probe
tctcttcggagacccaggatttagg

SEQ ID NO: 280912 - DNA, 25 bp, probe
taggtagttacctctgattcttgag

SEQ ID NO: 280913 - DNA, 25 bp, probe
taggtttgtaactgtttcatagaag

SEQ ID NO: 280914 - DNA, 25 bp, probe
tacttttgttggtgttatgggaatg

SEQ ID NO: 280915 - DNA, 25 bp, probe
taatttacttggcattttaggacat

SEQ ID NO: 280916 - DNA, 25 bp, probe
taatttactttcttctagaaagctc

SEQ ID NO: 280917 - DNA, 25 bp, probe
taacgtactatcactccattacacc

SEQ ID NO: 280918 - DNA, 25 bp, probe
taacgtactatcactccattacacc

SEQ ID NO: 280919 - DNA, 25 bp, probe
tatacgtttccatctaatttcaccg

SEQ ID NO: 280920 - DNA, 25 bp, probe
tctaattgttcatcctaattgttcc

SEQ ID NO: 280921 - DNA, 25 bp, probe
tctaatcaggtttctttattgttcc

SEQ ID NO: 280922 - DNA, 25 bp, probe
tctaaagtctatgtaatggtggtca

SEQ ID NO: 280923 - DNA, 25 bp, probe
tctaccagtccaaggaggccgggca

SEQ ID NO: 280924 - DNA, 25 bp, probe
tctagcaagccgctggggcttgggg

SEQ ID NO: 280925 - DNA, 25 bp, probe
tctaccaacgccaggacgtggcgcg

SEQ ID NO: 280926 - DNA, 25 bp, probe
tctaccacacctgtggcggtagcct

SEQ ID NO: 280927 - DNA, 25 bp, probe
tctaggacacctgtgcagggtccca

SEQ ID NO: 280928 - DNA, 25 bp, probe
tctcaagaccctgtcggtgatcatg

SEQ ID NO: 280929 - DNA, 25 bp, probe
tctacactcaccagagtgacgtctg

SEQ ID NO: 280930 - DNA, 25 bp, probe
tctacagcgccagagtgctgacgcc

SEQ ID NO: 280931 - DNA, 25 bp, probe
tctaccgcaagaagctgagccagcc

SEQ ID NO: 280932 - DNA, 25 bp, probe
tctaccgcaagaagctgagccagcc

SEQ ID NO: 280933 - DNA, 25 bp, probe
tctacgacggcaagtacctgcctgc

SEQ ID NO: 280934 - DNA, 25 bp, probe
tctagtaggtaagactgctgactct

SEQ ID NO: 280935 - DNA, 25 bp, probe
tctagtcaggaacccctgtatctca

SEQ ID NO: 280936 - DNA, 25 bp, probe
tctagtcaggaacccctgtatctca

SEQ ID NO: 280937 - DNA, 25 bp, probe
tctcagtgggcacagtctcttactc

SEQ ID NO: 280938 - DNA, 25 bp, probe
tctcagtgggcacagtctcttactc

SEQ ID NO: 280939 - DNA, 25 bp, probe
tctcagtgggcacagtctcttactc

SEQ ID NO: 280940 - DNA, 25 bp, probe
tcatagttcacctgtctcttatcta

SEQ ID NO: 280941 - DNA, 25 bp, probe
tctagttaccaatgctgcagtcctg

SEQ ID NO: 280942 - DNA, 25 bp, probe
tctaaaatctcacgactggctcact

SEQ ID NO: 280943 - DNA, 25 bp, probe
tctacaaatgccagacacctagcga

SEQ ID NO: 280944 - DNA, 25 bp, probe
tctagcaaatgctaaggcccctcag

SEQ ID NO: 280945 - DNA, 25 bp, probe
tctatgagatggccacaggccgtcc

SEQ ID NO: 280946 - DNA, 25 bp, probe
tcttacagtcgatggacttcctgat

SEQ ID NO: 280947 - DNA, 25 bp, probe
tctctattcaggtggacttgtttac

SEQ ID NO: 280948 - DNA, 25 bp, probe
tctctgatttggtgcgctgcatgag

SEQ ID NO: 280949 - DNA, 25 bp, probe
tctctgtggctgcaacggcatgaac

SEQ ID NO: 280950 - DNA, 25 bp, probe
tctctgtgtctcaatgcctgggact

SEQ ID NO: 280951 - DNA, 25 bp, probe
tctctgtgtctcaatgcctgggact

SEQ ID NO: 280952 - DNA, 25 bp, probe
tctctgtggccaatcccaatgactt

SEQ ID NO: 280953 - DNA, 25 bp, probe
tctagtactgcaactgccagaactt

SEQ ID NO: 280954 - DNA, 25 bp, probe
tctctgtaccacgtgcacatgaggt

SEQ ID NO: 280955 - DNA, 25 bp, probe
tctagatcactctgtagcgcatggt

SEQ ID NO: 280956 - DNA, 25 bp, probe
tctagatcactctgtagcgcatggt

SEQ ID NO: 280957 - DNA, 25 bp, probe
tctagataccaggctagcttttcta

SEQ ID NO: 280958 - DNA, 25 bp, probe
tctaatattagccttgtctttgatt

SEQ ID NO: 280959 - DNA, 25 bp, probe
tctacattgatagcatttattgtga

SEQ ID NO: 280960 - DNA, 25 bp, probe
tctctgcccaaggtgtcctatgtga

SEQ ID NO: 280961 - DNA, 25 bp, probe
tctctgcccaaggtgtcctatgtga

SEQ ID NO: 280962 - DNA, 25 bp, probe
tctctgccccagggatccaagatca

SEQ ID NO: 280963 - DNA, 25 bp, probe
tctcccactcagctatgctagggct

SEQ ID NO: 280964 - DNA, 25 bp, probe
tctcccacgacgatgcggacgtgtg

SEQ ID NO: 280965 - DNA, 25 bp, probe
tctcccacgacgatgcggacgtgtg

SEQ ID NO: 280966 - DNA, 25 bp, probe
tcttcaaagacgaggtaaggtgcaa

SEQ ID NO: 280967 - DNA, 25 bp, probe
tctctcaagggaaatggctaaggtg

SEQ ID NO: 280968 - DNA, 25 bp, probe
tctcccaggtgactgatgagtaagt

SEQ ID NO: 280969 - DNA, 25 bp, probe
tctcccaggtgactgatgagtaagt

SEQ ID NO: 280970 - DNA, 25 bp, probe
tctccctggtcactatcatgttgga

SEQ ID NO: 280971 - DNA, 25 bp, probe
tctcccagatacgttgcattgtgcc

SEQ ID NO: 280972 - DNA, 25 bp, probe
tctcgacagattcttcttgtgtcag

SEQ ID NO: 280973 - DNA, 25 bp, probe
tctctgaaccccaactatgagccag

SEQ ID NO: 280974 - DNA, 25 bp, probe
tctctgagtccataaccaggctcag

SEQ ID NO: 280975 - DNA, 25 bp, probe
tctctggccccagagggagctcagt

SEQ ID NO: 280976 - DNA, 25 bp, probe
tcttcacggccacagagggccagta

SEQ ID NO: 280977 - DNA, 25 bp, probe
tctacacggccacagagagccagta

SEQ ID NO: 280978 - DNA, 25 bp, probe
tctactacctcactagacatccaaa

SEQ ID NO: 280979 - DNA, 25 bp, probe
tctacttactaccagcaatgcaaaa

SEQ ID NO: 280980 - DNA, 25 bp, probe
tctacttactaccagcaatgcaaaa

SEQ ID NO: 280981 - DNA, 25 bp, probe
tctaccaactaccatgaggctaaaa

SEQ ID NO: 280982 - DNA, 25 bp, probe
tctacagcaacgagctgcaggtccc

SEQ ID NO: 280983 - DNA, 25 bp, probe
tctacagaacagctgctggtgcttc

SEQ ID NO: 280984 - DNA, 25 bp, probe
tctacagaagtggtgtctactatga

SEQ ID NO: 280985 - DNA, 25 bp, probe
tctagcataatttgtattgaaatga

SEQ ID NO: 280986 - DNA, 25 bp, probe
tctactcagatggaaattggttgaa

SEQ ID NO: 280987 - DNA, 25 bp, probe
tctattcaaggcattgagaatgtac

SEQ ID NO: 280988 - DNA, 25 bp, probe
tctatgtcacagctaaggagcatgc

SEQ ID NO: 280989 - DNA, 25 bp, probe
tctatgcgagagcttcggtcagccc

SEQ ID NO: 280990 - DNA, 25 bp, probe
tctaaggcaggcttcacagccagcc

SEQ ID NO: 280991 - DNA, 25 bp, probe
tctaaggcaggcttcacagccagcc

SEQ ID NO: 280992 - DNA, 25 bp, probe
tctcggtgacctacactgtcatcac

SEQ ID NO: 280993 - DNA, 25 bp, probe
tctctggtatcactacagttctgac

SEQ ID NO: 280994 - DNA, 25 bp, probe
tctcttgttctgacacaatcctgaa

SEQ ID NO: 280995 - DNA, 25 bp, probe
tctctttcgctggcgtctacagcaa

SEQ ID NO: 280996 - DNA, 25 bp, probe
tctctgccccggcttgagcagaaga

SEQ ID NO: 280997 - DNA, 25 bp, probe
tctcgcccctgaagttgtgaactat

SEQ ID NO: 280998 - DNA, 25 bp, probe
tctagcccatcattacctgtgaact

SEQ ID NO: 280999 - DNA, 25 bp, probe
tctcacctctattaagctgctgacc

SEQ ID NO: 281000 - DNA, 25 bp, probe
tctctactgtatgaactgctgacgg

SEQ ID NO: 281001 - DNA, 25 bp, probe
tcttacttgatgacaacagcgacat

SEQ ID NO: 281002 - DNA, 25 bp, probe
tctctgaaccagaaagcaagctcat

SEQ ID NO: 281003 - DNA, 25 bp, probe
tctctttgcaagaatcagccagcca

SEQ ID NO: 281004 - DNA, 25 bp, probe
tctctttgcaagaatcagccagcca

SEQ ID NO: 281005 - DNA, 25 bp, probe
tctcgagagaagatcaccctccttc

SEQ ID NO: 281006 - DNA, 25 bp, probe
tcatcgaacttaatagtaccctttt

SEQ ID NO: 281007 - DNA, 25 bp, probe
tctagatacttttcattaccttttt

SEQ ID NO: 281008 - DNA, 25 bp, probe
tctagaacgtggattccttcttttt

SEQ ID NO: 281009 - DNA, 25 bp, probe
tcatcgatttatcaatcccgttttg

SEQ ID NO: 281010 - DNA, 25 bp, probe
tctacatcttgttcaatcctcactt

SEQ ID NO: 281011 - DNA, 25 bp, probe
tctacatcttgttcaatcctcactt

SEQ ID NO: 281012 - DNA, 25 bp, probe
tctatcttctgcatgaacccatata

SEQ ID NO: 281013 - DNA, 25 bp, probe
tctcactcactgataatgcttatta

SEQ ID NO: 281014 - DNA, 25 bp, probe
tctctccagtaaacagtgcttctag

SEQ ID NO: 281015 - DNA, 25 bp, probe
tctacaagtaagacgtgtgtgtgtg

SEQ ID NO: 281016 - DNA, 25 bp, probe
tctagatagatgtgagctttttctt

SEQ ID NO: 281017 - DNA, 25 bp, probe
tctaaattgtgggtctatttctagt

SEQ ID NO: 281018 - DNA, 25 bp, probe
tctacgctttggggctaattcttgc

SEQ ID NO: 281019 - DNA, 25 bp, probe
tctcaggctcctacttgtaagtttc

SEQ ID NO: 281020 - DNA, 25 bp, probe
tctacgtcttcgttggcagagattt

SEQ ID NO: 281021 - DNA, 25 bp, probe
tctcagcagatcaaacatctggaaa

SEQ ID NO: 281022 - DNA, 25 bp, probe
tctcatgcacacaacccagtgtaca

SEQ ID NO: 281023 - DNA, 25 bp, probe
tctttgcccacccagtgtaatgtca

SEQ ID NO: 281024 - DNA, 25 bp, probe
tctttgcccacccagtgtaatgtca

SEQ ID NO: 281025 - DNA, 25 bp, probe
tctcttccacacaacagtgtagtgc

SEQ ID NO: 281026 - DNA, 25 bp, probe
tctcttccacacaacagtgtagtgc

SEQ ID NO: 281027 - DNA, 25 bp, probe
tctctccgcaccatagctgtggtgc

SEQ ID NO: 281028 - DNA, 25 bp, probe
tctctccgcaccatagctgtggtgc

SEQ ID NO: 281029 - DNA, 25 bp, probe
tctctccctccaggaggagtgagaa

SEQ ID NO: 281030 - DNA, 25 bp, probe
tctctgtactcctcaagcactggaa

SEQ ID NO: 281031 - DNA, 25 bp, probe
tctctggccttttcaagcagtggat

SEQ ID NO: 281032 - DNA, 25 bp, probe
tctatggtcttcaacaaggaggggg

SEQ ID NO: 281033 - DNA, 25 bp, probe
tcttccgtatcttaagtgaggaggc

SEQ ID NO: 281034 - DNA, 25 bp, probe
tcttgacaatgggaaactgggtggt

SEQ ID NO: 281035 - DNA, 25 bp, probe
tctatgggatggggtttgctggggc

SEQ ID NO: 281036 - DNA, 25 bp, probe
tcttggagagtggggttctggggtc

SEQ ID NO: 281037 - DNA, 25 bp, probe
tctttggtgtcgagttcgtgggccc

SEQ ID NO: 281038 - DNA, 25 bp, probe
tctacctttctgagtctcttggact

SEQ ID NO: 281039 - DNA, 25 bp, probe
tctacgtggtcgagtgcatcgccat

SEQ ID NO: 281040 - DNA, 25 bp, probe
tctacgtgtatgcgggcatcctggc

SEQ ID NO: 281041 - DNA, 25 bp, probe
tctacgataagcattgtgacctgga

SEQ ID NO: 281042 - DNA, 25 bp, probe
tctacgtcatagaattctcagggga

SEQ ID NO: 281043 - DNA, 25 bp, probe
tctactttaccttctgcagaggtgg

SEQ ID NO: 281044 - DNA, 25 bp, probe
tctcttttacctttggagccgaggt

SEQ ID NO: 281045 - DNA, 25 bp, probe
tctttctttactctgggtcagacct

SEQ ID NO: 281046 - DNA, 25 bp, probe
tctttccctacaactaggtcagccc

SEQ ID NO: 281047 - DNA, 25 bp, probe
tttgtaccttaagcatttcccagct

SEQ ID NO: 281048 - DNA, 25 bp, probe
tatttccctttagaacttcaagatt

SEQ ID NO: 281049 - DNA, 25 bp, probe
taatttcctaccaaaaaccaagatg

SEQ ID NO: 281050 - DNA, 25 bp, probe
taatttcccctcagattaaaataga

SEQ ID NO: 281051 - DNA, 25 bp, probe
taatttcccctcagattaaaataga

SEQ ID NO: 281052 - DNA, 25 bp, probe
taattctaccctgtattttataaat

SEQ ID NO: 281053 - DNA, 25 bp, probe
taattctaccctgtattttataaat

SEQ ID NO: 281054 - DNA, 25 bp, probe
taatcactaacccgttttattctat

SEQ ID NO: 281055 - DNA, 25 bp, probe
taataatacctcccttagaagtttg

SEQ ID NO: 281056 - DNA, 25 bp, probe
tctataaaactacccataagccttt

SEQ ID NO: 281057 - DNA, 25 bp, probe
tttaacaatatgggtattacctttg

SEQ ID NO: 281058 - DNA, 25 bp, probe
tcttatttattgtgtttacctctta

SEQ ID NO: 281059 - DNA, 25 bp, probe
tcttttggttgtcagtttcatttta

SEQ ID NO: 281060 - DNA, 25 bp, probe
tctcttttgttgctgagttctcagt

SEQ ID NO: 281061 - DNA, 25 bp, probe
tctctggtttgtcatggagttctgt

SEQ ID NO: 281062 - DNA, 25 bp, probe
tctctgtttcttcaatggttctctt

SEQ ID NO: 281063 - DNA, 25 bp, probe
tctatgtttcatagttggggtcata

SEQ ID NO: 281064 - DNA, 25 bp, probe
tctctgttccatagttaaagaagac

SEQ ID NO: 281065 - DNA, 25 bp, probe
tctagttcctagtccaaaatcattt

SEQ ID NO: 281066 - DNA, 25 bp, probe
tctagtccaggtgccaagaatttcc

SEQ ID NO: 281067 - DNA, 25 bp, probe
tctcagtcaagggcgccaacaacag

SEQ ID NO: 281068 - DNA, 25 bp, probe
tctcagtcaagggcgccaacaacag

SEQ ID NO: 281069 - DNA, 25 bp, probe
tctagtcaagacggcatctggcaac

SEQ ID NO: 281070 - DNA, 25 bp, probe
tctagtcctggaacaattgcacacc

SEQ ID NO: 281071 - DNA, 25 bp, probe
tctactccttgttcaatgtcatctc

SEQ ID NO: 281072 - DNA, 25 bp, probe
tctactctgtggagcacgatgtgcc

SEQ ID NO: 281073 - DNA, 25 bp, probe
tctactctgtggagcacgatgtgcc

SEQ ID NO: 281074 - DNA, 25 bp, probe
tctactattggcaagaggagagctt

SEQ ID NO: 281075 - DNA, 25 bp, probe
tctactattggcaagaggagagctt

SEQ ID NO: 281076 - DNA, 25 bp, probe
tctactttaccatgacaagccttac

SEQ ID NO: 281077 - DNA, 25 bp, probe
tctacctttgtaaaacagcctatag

SEQ ID NO: 281078 - DNA, 25 bp, probe
tctaccactatgagaaaggcctgtt

SEQ ID NO: 281079 - DNA, 25 bp, probe
tctcactttgagattgaagcccttt

SEQ ID NO: 281080 - DNA, 25 bp, probe
tctcagctttggacattaggtcttt

SEQ ID NO: 281081 - DNA, 25 bp, probe
tctagtctttatttatggtcgtgcc

SEQ ID NO: 281082 - DNA, 25 bp, probe
tctcagtctttatttgtgtaattca

SEQ ID NO: 281083 - DNA, 25 bp, probe
tctcagtgtgttctggtcatcttgt

SEQ ID NO: 281084 - DNA, 25 bp, probe
tctcagcaatctcttggtcttggct

SEQ ID NO: 281085 - DNA, 25 bp, probe
tctcatgcttcttctcatggggtgg

SEQ ID NO: 281086 - DNA, 25 bp, probe
tctcatcttcataataccagtgtga

SEQ ID NO: 281087 - DNA, 25 bp, probe
tctcttcgataattccagttggtgg

SEQ ID NO: 281088 - DNA, 25 bp, probe
tctttcctaatctggttgtcatgcc

SEQ ID NO: 281089 - DNA, 25 bp, probe
tctttccaactctacggatttgcct

SEQ ID NO: 281090 - DNA, 25 bp, probe
tctacctccatttagggatttgctt

SEQ ID NO: 281091 - DNA, 25 bp, probe
tctcactccctttgtggactttatt

SEQ ID NO: 281092 - DNA, 25 bp, probe
tctcattttgctaaggaagtttatt

SEQ ID NO: 281093 - DNA, 25 bp, probe
tcttggtgtgtgggagaagttttat

SEQ ID NO: 281094 - DNA, 25 bp, probe
ttttgttgggggtgctttgtaatct

SEQ ID NO: 281095 - DNA, 25 bp, probe
tttttttggtcatagtgggtggatt

SEQ ID NO: 281096 - DNA, 25 bp, probe
tatttggtgtggcttaacggtattt

SEQ ID NO: 281097 - DNA, 25 bp, probe
ttttggctggggagagacgtactct

SEQ ID NO: 281098 - DNA, 25 bp, probe
ttttctggtgggagaatctatacct

SEQ ID NO: 281099 - DNA, 25 bp, probe
ttgtctttttagatgcccaaatcct

SEQ ID NO: 281100 - DNA, 25 bp, probe
ttgtctttttagatgcccaaatcct

SEQ ID NO: 281101 - DNA, 25 bp, probe
tcatggaggatttagtacccaaatc

SEQ ID NO: 281102 - DNA, 25 bp, probe
tcatgaggcgacaggtcttcaaatt

SEQ ID NO: 281103 - DNA, 25 bp, probe
tctcaatggatgctggattctaaaa

SEQ ID NO: 281104 - DNA, 25 bp, probe
tcttatgacggttttgtaaatactg

SEQ ID NO: 281105 - DNA, 25 bp, probe
tcttatgacggttttgtaaatactg

SEQ ID NO: 281106 - DNA, 25 bp, probe
tctcttcaccgtgttaacataatct

SEQ ID NO: 281107 - DNA, 25 bp, probe
tctcttcacctgtcttaagattaaa

SEQ ID NO: 281108 - DNA, 25 bp, probe
tctcttctcctgcctggattattta

SEQ ID NO: 281109 - DNA, 25 bp, probe
tctctcatatccttcggcattgggt

SEQ ID NO: 281110 - DNA, 25 bp, probe
tcttgattccagaaacatatgggct

SEQ ID NO: 281111 - DNA, 25 bp, probe
tctatgttcccaagagtttgacttc

SEQ ID NO: 281112 - DNA, 25 bp, probe
tctctctttgccaggaatagacatc

SEQ ID NO: 281113 - DNA, 25 bp, probe
tctttttcccggcaatgatgtcgat

SEQ ID NO: 281114 - DNA, 25 bp, probe
tctttttcccggcaatgatgtcgat

SEQ ID NO: 281115 - DNA, 25 bp, probe
tcttttgttctcatggaattggcct

SEQ ID NO: 281116 - DNA, 25 bp, probe
tctttattttctataactgttcaaa

SEQ ID NO: 281117 - DNA, 25 bp, probe
tctctctttttgaagtacattctta

SEQ ID NO: 281118 - DNA, 25 bp, probe
tctctctttttgaagtacattctta

SEQ ID NO: 281119 - DNA, 25 bp, probe
tctctcaatgttagatttaattccc

SEQ ID NO: 281120 - DNA, 25 bp, probe
tctctgcagagtttgttgactttac

SEQ ID NO: 281121 - DNA, 25 bp, probe
tctctaagttacatgacctatatct

SEQ ID NO: 281122 - DNA, 25 bp, probe
tctctctgtgtttattagccttcca

SEQ ID NO: 281123 - DNA, 25 bp, probe
tctctctgtgtttattagccttcca

SEQ ID NO: 281124 - DNA, 25 bp, probe
tctctaatctgttttgagtctttac

SEQ ID NO: 281125 - DNA, 25 bp, probe
tctctcaatctcatgcttgagtctc

SEQ ID NO: 281126 - DNA, 25 bp, probe
tcttcagcatcagcatgttggacac

SEQ ID NO: 281127 - DNA, 25 bp, probe
tcttcagcatcagcatgttggacac

SEQ ID NO: 281128 - DNA, 25 bp, probe
tctacacacacttctgatgaacagc

SEQ ID NO: 281129 - DNA, 25 bp, probe
tctacacaggtgtcaatgatgatgg

SEQ ID NO: 281130 - DNA, 25 bp, probe
tctacacaggtgtctatgacgatgg

SEQ ID NO: 281131 - DNA, 25 bp, probe
tctcaacagctttccattcagtctg

SEQ ID NO: 281132 - DNA, 25 bp, probe
tctctacgccaagcattatgtgctg

SEQ ID NO: 281133 - DNA, 25 bp, probe
tctctaccaactaccatgaggctaa

SEQ ID NO: 281134 - DNA, 25 bp, probe
tcttaacaacctggcttgcagtaag

SEQ ID NO: 281135 - DNA, 25 bp, probe
tcttaaggactctcttgcattaggg

SEQ ID NO: 281136 - DNA, 25 bp, probe
tcttcagagaacaccctctaggggc

SEQ ID NO: 281137 - DNA, 25 bp, probe
tctctcaaagaaacacctcaactgg

SEQ ID NO: 281138 - DNA, 25 bp, probe
tctctcaatgtgtaacacactgcag

SEQ ID NO: 281139 - DNA, 25 bp, probe
tctctcagcacttgctaccagagag

SEQ ID NO: 281140 - DNA, 25 bp, probe
tctctatactctgaccacaagacca

SEQ ID NO: 281141 - DNA, 25 bp, probe
tctctatactctgaccacaagacca

SEQ ID NO: 281142 - DNA, 25 bp, probe
tctctacatcttgttcaatcctcac

SEQ ID NO: 281143 - DNA, 25 bp, probe
tctctacacactctttgatgccatc

SEQ ID NO: 281144 - DNA, 25 bp, probe
tctcatagctttcttttccattttc

SEQ ID NO: 281145 - DNA, 25 bp, probe
tttacttagcggattcctgcctttt

SEQ ID NO: 281146 - DNA, 25 bp, probe
tttgaaattcggattctcctcttga

SEQ ID NO: 281147 - DNA, 25 bp, probe
tttggatataaatcttacccttcaa

SEQ ID NO: 281148 - DNA, 25 bp, probe
tttggatataaatcttacccttcaa

SEQ ID NO: 281149 - DNA, 25 bp, probe
tcttggtagaagcccttctaccttc

SEQ ID NO: 281150 - DNA, 25 bp, probe
tctttgtattaccctttggacttgg

SEQ ID NO: 281151 - DNA, 25 bp, probe
tctttaacctggtctactgggttgg

SEQ ID NO: 281152 - DNA, 25 bp, probe
tctttgaacctttggaggccgttga

SEQ ID NO: 281153 - DNA, 25 bp, probe
tctagtggaccttgggaggccagcc

SEQ ID NO: 281154 - DNA, 25 bp, probe
tctagaggatacttgaatggacctc

SEQ ID NO: 281155 - DNA, 25 bp, probe
tctcagaggacttggcaagggccgc

SEQ ID NO: 281156 - DNA, 25 bp, probe
tctcagtgtatcggagcctggcagc

SEQ ID NO: 281157 - DNA, 25 bp, probe
tctcactgtctaggagcatcacctc

SEQ ID NO: 281158 - DNA, 25 bp, probe
tctcactggctgtcagtatgacatt

SEQ ID NO: 281159 - DNA, 25 bp, probe
tctcactggctgtcagtatgacatt

SEQ ID NO: 281160 - DNA, 25 bp, probe
tctacaggctaaatatacatcatag

SEQ ID NO: 281161 - DNA, 25 bp, probe
tcttatgagttttctaatcatagag

SEQ ID NO: 281162 - DNA, 25 bp, probe
tctatgtcaggattaccagattaca

SEQ ID NO: 281163 - DNA, 25 bp, probe
tcttgtcctaaagcaattgaagttg

SEQ ID NO: 281164 - DNA, 25 bp, probe
tctttttcgaagagcatgtgaagtt

SEQ ID NO: 281165 - DNA, 25 bp, probe
tctttgttcctaatgacgtggactt

SEQ ID NO: 281166 - DNA, 25 bp, probe
tctttaatcctgactacgtcccaaa

SEQ ID NO: 281167 - DNA, 25 bp, probe
tctctttagacgacctcttccaaaa

SEQ ID NO: 281168 - DNA, 25 bp, probe
tctctttagacgacctcttccaaaa

SEQ ID NO: 281169 - DNA, 25 bp, probe
tctcatctttgagtttctttccatg

SEQ ID NO: 281170 - DNA, 25 bp, probe
tctcatctttgagtttctttccatg

SEQ ID NO: 281171 - DNA, 25 bp, probe
tctcttttgcagtttgctgctttgt

SEQ ID NO: 281172 - DNA, 25 bp, probe
tctcttttgcagtttgctgctttgt

SEQ ID NO: 281173 - DNA, 25 bp, probe
tctctcttgctttgttctttatttg

SEQ ID NO: 281174 - DNA, 25 bp, probe
tctctttccttttttgctgatgtgt

SEQ ID NO: 281175 - DNA, 25 bp, probe
tctctttccttttttgctgatgtgt

SEQ ID NO: 281176 - DNA, 25 bp, probe
tctcttgtcctcagaatccatattg

SEQ ID NO: 281177 - DNA, 25 bp, probe
tctctattcctcgcagatctgcaag

SEQ ID NO: 281178 - DNA, 25 bp, probe
tctctagcactgccatccaatttag

SEQ ID NO: 281179 - DNA, 25 bp, probe
tctctcgccgccaatgcttgttcag

SEQ ID NO: 281180 - DNA, 25 bp, probe
tctctctggcctatgcctttgagag

SEQ ID NO: 281181 - DNA, 25 bp, probe
tctctctggcctatgcctttgagag

SEQ ID NO: 281182 - DNA, 25 bp, probe
tctcttggccacagataataggagt

SEQ ID NO: 281183 - DNA, 25 bp, probe
tctctaagcttctgattaaggagaa

SEQ ID NO: 281184 - DNA, 25 bp, probe
tcttcacagtcgggttacaggcgag

SEQ ID NO: 281185 - DNA, 25 bp, probe
tcatttcaacgccgactacaggaag

SEQ ID NO: 281186 - DNA, 25 bp, probe
tctcttccacgaagttccggaagcc

SEQ ID NO: 281187 - DNA, 25 bp, probe
tctcttcccagttgcatttgcagga

SEQ ID NO: 281188 - DNA, 25 bp, probe
tctctctcctggatcagggtggatc

SEQ ID NO: 281189 - DNA, 25 bp, probe
tctctctcctggatcagggtggatc

SEQ ID NO: 281190 - DNA, 25 bp, probe
tcttctccatggccacaggttgaag

SEQ ID NO: 281191 - DNA, 25 bp, probe
tctcttaacgccactggtgatagga

SEQ ID NO: 281192 - DNA, 25 bp, probe
tctcttaacgccactggtgatagga

SEQ ID NO: 281193 - DNA, 25 bp, probe
tctttagacttcacttgtggtttgt

SEQ ID NO: 281194 - DNA, 25 bp, probe
tctcttaacttaatttttcctgctg

SEQ ID NO: 281195 - DNA, 25 bp, probe
tctcttattctcagattttctcctc

SEQ ID NO: 281196 - DNA, 25 bp, probe
tctacaatcctcaagattgcttcag

SEQ ID NO: 281197 - DNA, 25 bp, probe
tctacaggcctcatctggcttcaga

SEQ ID NO: 281198 - DNA, 25 bp, probe
tctagcagatgcctcttgttttaat

SEQ ID NO: 281199 - DNA, 25 bp, probe
tctagaagagtctattgtctccttg

SEQ ID NO: 281200 - DNA, 25 bp, probe
tctcagaagaatgatcacctccaat

SEQ ID NO: 281201 - DNA, 25 bp, probe
tctctcttgagagaccctctgaatt

SEQ ID NO: 281202 - DNA, 25 bp, probe
tctcactcaacaaagccctctgaaa

SEQ ID NO: 281203 - DNA, 25 bp, probe
ttcaccccaaagtcctatagaaaat

SEQ ID NO: 281204 - DNA, 25 bp, probe
ttcaccccaaagtcctatagaaaat

SEQ ID NO: 281205 - DNA, 25 bp, probe
tctaccaccaatacgtttaaataat

SEQ ID NO: 281206 - DNA, 25 bp, probe
taatccccaagaattttggaatata

SEQ ID NO: 281207 - DNA, 25 bp, probe
taaccactttttgttgggcaatatg

SEQ ID NO: 281208 - DNA, 25 bp, probe
taaagcctttttttaggccacattg

SEQ ID NO: 281209 - DNA, 25 bp, probe
tctaaactctttcttggatgccacc

SEQ ID NO: 281210 - DNA, 25 bp, probe
tctaatggctttattgcagcgatta

SEQ ID NO: 281211 - DNA, 25 bp, probe
tctcattgtctttttgcatcagtac

SEQ ID NO: 281212 - DNA, 25 bp, probe
tctcaggctctgatgctaagcagct

SEQ ID NO: 281213 - DNA, 25 bp, probe
tctcaggctctgatgctaagcagct

SEQ ID NO: 281214 - DNA, 25 bp, probe
tctcaggcctagctcagatgatgcg

SEQ ID NO: 281215 - DNA, 25 bp, probe
tctcagtgcctcagtctggaatggt

SEQ ID NO: 281216 - DNA, 25 bp, probe
tctcaatgcctgggactggaggttg

SEQ ID NO: 281217 - DNA, 25 bp, probe
tctcatcacctccaggtggactgct

SEQ ID NO: 281218 - DNA, 25 bp, probe
tctcatcacctccaggtggactgct

SEQ ID NO: 281219 - DNA, 25 bp, probe
tctcaccgctgtagctgtggcggct

SEQ ID NO: 281220 - DNA, 25 bp, probe
tcttcatggcattgatggtccggct

SEQ ID NO: 281221 - DNA, 25 bp, probe
tcttgttgaatccagtccaggtaac

SEQ ID NO: 281222 - DNA, 25 bp, probe
tcttgttgaatccagtccaggtaac

SEQ ID NO: 281223 - DNA, 25 bp, probe
tcttttgaatggcctctttgtgacc

SEQ ID NO: 281224 - DNA, 25 bp, probe
tctctattggaggcagcacttttcc

SEQ ID NO: 281225 - DNA, 25 bp, probe
tctcattggagagtacctgctgttc

SEQ ID NO: 281226 - DNA, 25 bp, probe
tctcattgtgtgactcagtgctgct

SEQ ID NO: 281227 - DNA, 25 bp, probe
tctaggtgtgaccagggtgggccac

SEQ ID NO: 281228 - DNA, 25 bp, probe
tctaggtgtgaccagggtgggccac

SEQ ID NO: 281229 - DNA, 25 bp, probe
tctctagtggaccagacgagtgggg

SEQ ID NO: 281230 - DNA, 25 bp, probe
tctcttgctggctgggcgagatgag

SEQ ID NO: 281231 - DNA, 25 bp, probe
tctcttctccctgtgccagaagatc

SEQ ID NO: 281232 - DNA, 25 bp, probe
tctcttctccctgtgccagaagatc

SEQ ID NO: 281233 - DNA, 25 bp, probe
tctcttcataccggttttatgacaa

SEQ ID NO: 281234 - DNA, 25 bp, probe
ttttctcacttccggtttgacgtgg

SEQ ID NO: 281235 - DNA, 25 bp, probe
tctttctatgccagccgtttaggga

SEQ ID NO: 281236 - DNA, 25 bp, probe
tctaatgcatgtattcgggttaggg

SEQ ID NO: 281237 - DNA, 25 bp, probe
tctcttgcatgattcttcttggtct

SEQ ID NO: 281238 - DNA, 25 bp, probe
tctcttgtgactctcagcgtatgtt

SEQ ID NO: 281239 - DNA, 25 bp, probe
tctcttggatctcctcagatctttg

SEQ ID NO: 281240 - DNA, 25 bp, probe
tctcattcaattgtgacattgttct

SEQ ID NO: 281241 - DNA, 25 bp, probe
tctcattcttaggtgcattttatct

SEQ ID NO: 281242 - DNA, 25 bp, probe
tctatggattcacttctatttattt

SEQ ID NO: 281243 - DNA, 25 bp, probe
tctaggatccaagtttccttatttg

SEQ ID NO: 281244 - DNA, 25 bp, probe
tctcaggagtatcttacctgtaaag

SEQ ID NO: 281245 - DNA, 25 bp, probe
tctcagaggattctgaaccactaga

SEQ ID NO: 281246 - DNA, 25 bp, probe
tctcagaggattctgaaccactaga

SEQ ID NO: 281247 - DNA, 25 bp, probe
tctcagctggatgcagtgaaccttg

SEQ ID NO: 281248 - DNA, 25 bp, probe
tctcagcagcagcccagatgcaagc

SEQ ID NO: 281249 - DNA, 25 bp, probe
tctcagccattcagcagcatatcag

SEQ ID NO: 281250 - DNA, 25 bp, probe
tctcagccattcagcagcatatcag

SEQ ID NO: 281251 - DNA, 25 bp, probe
tctcatgccattagctctctacaaa

SEQ ID NO: 281252 - DNA, 25 bp, probe
tctcatgccattagctctctacaaa

SEQ ID NO: 281253 - DNA, 25 bp, probe
tctcatgcactgatatgtccacagc

SEQ ID NO: 281254 - DNA, 25 bp, probe
tctacactgttagtgccacagcacc

SEQ ID NO: 281255 - DNA, 25 bp, probe
tctactctttctgccaagagcctgc

SEQ ID NO: 281256 - DNA, 25 bp, probe
tctacattgttctctcaaagacttt

SEQ ID NO: 281257 - DNA, 25 bp, probe
tctatggctttctctcagacaactt

SEQ ID NO: 281258 - DNA, 25 bp, probe
tcttgtcttttttagggacttcaat

SEQ ID NO: 281259 - DNA, 25 bp, probe
tcttgtcttttttagggacttcaat

SEQ ID NO: 281260 - DNA, 25 bp, probe
tttccttttgtctacggaagcctct

SEQ ID NO: 281261 - DNA, 25 bp, probe
tctacctctgtccttcaaggaagcc

SEQ ID NO: 281262 - DNA, 25 bp, probe
tctaccattgcttgttcagagaaca

SEQ ID NO: 281263 - DNA, 25 bp, probe
tctcagcacttgctaccagagagga

SEQ ID NO: 281264 - DNA, 25 bp, probe
tctaagccaggagccgagatggaaa

SEQ ID NO: 281265 - DNA, 25 bp, probe
tcttcccagagggccggctggaaca

SEQ ID NO: 281266 - DNA, 25 bp, probe
tcttccccaagtgcggggagtacaa

SEQ ID NO: 281267 - DNA, 25 bp, probe
tcttctaccaacgccaggacgtggc

SEQ ID NO: 281268 - DNA, 25 bp, probe
tctcttatcccaattcaagaccctt

SEQ ID NO: 281269 - DNA, 25 bp, probe
tctcttatcccaattcaagaccctt

SEQ ID NO: 281270 - DNA, 25 bp, probe
tctctttcagtattaaactctcctt

SEQ ID NO: 281271 - DNA, 25 bp, probe
tctctttcagtattaaactctcctt

SEQ ID NO: 281272 - DNA, 25 bp, probe
tcttcgagagtatagaaccgttcat

SEQ ID NO: 281273 - DNA, 25 bp, probe
tcttcggggagaagagccgaatgta

SEQ ID NO: 281274 - DNA, 25 bp, probe
tcttcggtgagaccaaccaatgtat

SEQ ID NO: 281275 - DNA, 25 bp, probe
tcttgctggagaaccgatcccttag

SEQ ID NO: 281276 - DNA, 25 bp, probe
tctcttgctgtaacacttgacctta

SEQ ID NO: 281277 - DNA, 25 bp, probe
tctcttatctattcacttctggtgc

SEQ ID NO: 281278 - DNA, 25 bp, probe
tctcttactcttactgacatcgtgt

SEQ ID NO: 281279 - DNA, 25 bp, probe
tctcttcactgcacattgcaatgca

SEQ ID NO: 281280 - DNA, 25 bp, probe
tctttgcccaaaatgcagtgccaag

SEQ ID NO: 281281 - DNA, 25 bp, probe
tctcttgccacatcaatatcccaga

SEQ ID NO: 281282 - DNA, 25 bp, probe
tctcattatctctacaatcctcaag

SEQ ID NO: 281283 - DNA, 25 bp, probe
tctcaaatccaatagttcacagctg

SEQ ID NO: 281284 - DNA, 25 bp, probe
tctcatttaccatcatgtatccagt

SEQ ID NO: 281285 - DNA, 25 bp, probe
tctcttgtaccatagaaaaatgtat

SEQ ID NO: 281286 - DNA, 25 bp, probe
tctcttctacctccaatgaaaatgt

SEQ ID NO: 281287 - DNA, 25 bp, probe
tctcttcactcccaataactaatgc

SEQ ID NO: 281288 - DNA, 25 bp, probe
tctcttcctggatatcatcacttat

SEQ ID NO: 281289 - DNA, 25 bp, probe
tctattccttccaatgagagattat

SEQ ID NO: 281290 - DNA, 25 bp, probe
tctcatgtccttcaaatctgttagc

SEQ ID NO: 281291 - DNA, 25 bp, probe
tctcatgtccttcaaatctgttagc

SEQ ID NO: 281292 - DNA, 25 bp, probe
tctcagtctcttgcgtttattacga

SEQ ID NO: 281293 - DNA, 25 bp, probe
tctcagtctcttgcgtttattacga

SEQ ID NO: 281294 - DNA, 25 bp, probe
tcttgtccttgctggttttctggat

SEQ ID NO: 281295 - DNA, 25 bp, probe
tctttcctgtgagggcttggtttcc

SEQ ID NO: 281296 - DNA, 25 bp, probe
tcttaatgtttggagcttgccttgt

SEQ ID NO: 281297 - DNA, 25 bp, probe
tcttaatgtttggagcttgccttgt

SEQ ID NO: 281298 - DNA, 25 bp, probe
tcttagcgggtggatttccctgacc

SEQ ID NO: 281299 - DNA, 25 bp, probe
tctttggggttgacttcctacagct

SEQ ID NO: 281300 - DNA, 25 bp, probe
tctttggggttttctcctcatcaaa

SEQ ID NO: 281301 - DNA, 25 bp, probe
tttattgtcagtttttccagtaagg

SEQ ID NO: 281302 - DNA, 25 bp, probe
tctttctttatgctttccttacagg

SEQ ID NO: 281303 - DNA, 25 bp, probe
tctattttaggcctctgtccatgta

SEQ ID NO: 281304 - DNA, 25 bp, probe
tctaatcttaggcgcttcaggcgga

SEQ ID NO: 281305 - DNA, 25 bp, probe
ttcccattaggcccattagggggca

SEQ ID NO: 281306 - DNA, 25 bp, probe
ttcctttatgccctcttggggaaag

SEQ ID NO: 281307 - DNA, 25 bp, probe
tctacaattgtgcgttgacggaaaa

SEQ ID NO: 281308 - DNA, 25 bp, probe
tctacacacttgcagtttggaagaa

SEQ ID NO: 281309 - DNA, 25 bp, probe
tctactggcttgtaatttagggaaa

SEQ ID NO: 281310 - DNA, 25 bp, probe
tcttctccttaattaactgggatga

SEQ ID NO: 281311 - DNA, 25 bp, probe
tcttcccattcttttacttagtgca

SEQ ID NO: 281312 - DNA, 25 bp, probe
tcttccttctttatacttttctcag

SEQ ID NO: 281313 - DNA, 25 bp, probe
tctaccattttaatctcactttttc

SEQ ID NO: 281314 - DNA, 25 bp, probe
tctaacttttacttgctttttccag

SEQ ID NO: 281315 - DNA, 25 bp, probe
tctaactttaactatttctaccaca

SEQ ID NO: 281316 - DNA, 25 bp, probe
tctagacaattctctattttactga

SEQ ID NO: 281317 - DNA, 25 bp, probe
tcacaccaagactttattgttagga

SEQ ID NO: 281318 - DNA, 25 bp, probe
tctcatacaaggcttattcttattt

SEQ ID NO: 281319 - DNA, 25 bp, probe
tctataatgagccgttaagtctttt

SEQ ID NO: 281320 - DNA, 25 bp, probe
tctatgagatggggaacaagcttgt

SEQ ID NO: 281321 - DNA, 25 bp, probe
tctatcgcaggagtgctgaaacagg

SEQ ID NO: 281322 - DNA, 25 bp, probe
tctatgcaatgttcaggataaatcg

SEQ ID NO: 281323 - DNA, 25 bp, probe
tctaccattgctacgatactccgag

SEQ ID NO: 281324 - DNA, 25 bp, probe
tctacatcacagtccgaaatccgca

SEQ ID NO: 281325 - DNA, 25 bp, probe
tctacacaaatccagctaacaccag

SEQ ID NO: 281326 - DNA, 25 bp, probe
tcttgtggaatggagtaaaccagtg

SEQ ID NO: 281327 - DNA, 25 bp, probe
tcttgaggcacagtttccagtccag

SEQ ID NO: 281328 - DNA, 25 bp, probe
tcttaggcagtctttgccattccca

SEQ ID NO: 281329 - DNA, 25 bp, probe
tctacatgggtgcttcccattccag

SEQ ID NO: 281330 - DNA, 25 bp, probe
tctacagggtggtcttcgacatcac

SEQ ID NO: 281331 - DNA, 25 bp, probe
tctacgagaggtcctcatctccatc

SEQ ID NO: 281332 - DNA, 25 bp, probe
tctagctgagttgtctctgtccaca

SEQ ID NO: 281333 - DNA, 25 bp, probe
tatactgagtaccctaggccaactt

SEQ ID NO: 281334 - DNA, 25 bp, probe
tctacggctacttcaacgagaactt

SEQ ID NO: 281335 - DNA, 25 bp, probe
tctaccgctacatgaaccagagctt

SEQ ID NO: 281336 - DNA, 25 bp, probe
tctacacgctggccagcaaggagat

SEQ ID NO: 281337 - DNA, 25 bp, probe
tctacgagctggccagcctcaagag

SEQ ID NO: 281338 - DNA, 25 bp, probe
tctacgagctggccagcctcaagag

SEQ ID NO: 281339 - DNA, 25 bp, probe
tctactgatgctagacacttggcag

SEQ ID NO: 281340 - DNA, 25 bp, probe
tctatcttctaaacttggcagtttc

SEQ ID NO: 281341 - DNA, 25 bp, probe
tcttctgacttaggattggcctttt

SEQ ID NO: 281342 - DNA, 25 bp, probe
tcattccacttacaattcctaatct

SEQ ID NO: 281343 - DNA, 25 bp, probe
tcattccagttaccgtatactactc

SEQ ID NO: 281344 - DNA, 25 bp, probe
tcattccagttaccgtatactactc

SEQ ID NO: 281345 - DNA, 25 bp, probe
tctacctggctagagtttcttctca

SEQ ID NO: 281346 - DNA, 25 bp, probe
tctacctgtccccaaatttttatat

SEQ ID NO: 281347 - DNA, 25 bp, probe
tctacatttctagaaagttcttatc

SEQ ID NO: 281348 - DNA, 25 bp, probe
tctactatccttgctaagttttcat

SEQ ID NO: 281349 - DNA, 25 bp, probe
tcttctcctttgtcaaatggtattt

SEQ ID NO: 281350 - DNA, 25 bp, probe
tcttggccactttaatagtttctga

SEQ ID NO: 281351 - DNA, 25 bp, probe
tcttggccactttaatagtttctga

SEQ ID NO: 281352 - DNA, 25 bp, probe
tcttaggatcctagttcagtttctg

SEQ ID NO: 281353 - DNA, 25 bp, probe
tcttatactattagttcgttaccga

SEQ ID NO: 281354 - DNA, 25 bp, probe
tctttactttctcttgaatatgcta

SEQ ID NO: 281355 - DNA, 25 bp, probe
ttttcctttagccttagcagtgggt

SEQ ID NO: 281356 - DNA, 25 bp, probe
tctttcttttcccatttctggggct

SEQ ID NO: 281357 - DNA, 25 bp, probe
tcttttttatatctctttggcgttt

SEQ ID NO: 281358 - DNA, 25 bp, probe
tcttctttgtaaaccatgtcatgtg

SEQ ID NO: 281359 - DNA, 25 bp, probe
tctagcttttaagccatgcttgctc

SEQ ID NO: 281360 - DNA, 25 bp, probe
taaggcttgtaaggccctctggttt

SEQ ID NO: 281361 - DNA, 25 bp, probe
taaacctgaaggccgccctacattt

SEQ ID NO: 281362 - DNA, 25 bp, probe
taaacctgaaggccgccctacattt

SEQ ID NO: 281363 - DNA, 25 bp, probe
tcaaacggccgaagttgcctctttt

SEQ ID NO: 281364 - DNA, 25 bp, probe
tcagtaaccctgaatttgcctttct

SEQ ID NO: 281365 - DNA, 25 bp, probe
tctttgaccctgaatttgacctact

SEQ ID NO: 281366 - DNA, 25 bp, probe
tctttgaccctgaatttgacctact

SEQ ID NO: 281367 - DNA, 25 bp, probe
tcttttcgtacctctatcactaatt

SEQ ID NO: 281368 - DNA, 25 bp, probe
tctttaaaacacaccagccataaaa

SEQ ID NO: 281369 - DNA, 25 bp, probe
tctaggaaatacacccaccatgcca

SEQ ID NO: 281370 - DNA, 25 bp, probe
tctaggaaatacacccaccatgcca

SEQ ID NO: 281371 - DNA, 25 bp, probe
tctagagaaaaaacctcccacacct

SEQ ID NO: 281372 - DNA, 25 bp, probe
tctagacaagaacatacataccccg

SEQ ID NO: 281373 - DNA, 25 bp, probe
tctacaaagagaagctacaaacccc

SEQ ID NO: 281374 - DNA, 25 bp, probe
tcattaataagaagattactccccc

SEQ ID NO: 281375 - DNA, 25 bp, probe
tctatgaaacggattactaccggaa

SEQ ID NO: 281376 - DNA, 25 bp, probe
tctcagagtagcccatttcctaggg

SEQ ID NO: 281377 - DNA, 25 bp, probe
tctcagagtaccgaggctccaagga

SEQ ID NO: 281378 - DNA, 25 bp, probe
tcataagtacttgtgtcatccagaa

SEQ ID NO: 281379 - DNA, 25 bp, probe
tctacttttatgtgtctcagaatat

SEQ ID NO: 281380 - DNA, 25 bp, probe
tctacaattttattttatgatctat

SEQ ID NO: 281381 - DNA, 25 bp, probe
tctacacctctatatattatattac

SEQ ID NO: 281382 - DNA, 25 bp, probe
tctcagcactcttacttatttctct

SEQ ID NO: 281383 - DNA, 25 bp, probe
tctcaatgattctagatgacttctt

SEQ ID NO: 281384 - DNA, 25 bp, probe
tctcagcagttcatatgccgtcact

SEQ ID NO: 281385 - DNA, 25 bp, probe
tctcagcagtatcgtagccttcgtt

SEQ ID NO: 281386 - DNA, 25 bp, probe
tctcagcagtatcgtagccttcgtt

SEQ ID NO: 281387 - DNA, 25 bp, probe
tctcagattatgccaacttcaagta

SEQ ID NO: 281388 - DNA, 25 bp, probe
tcttgtatatcctactcagcggcta

SEQ ID NO: 281389 - DNA, 25 bp, probe
tctatggatgtctcaaccggcagat

SEQ ID NO: 281390 - DNA, 25 bp, probe
tctatgcctgattacaagccaagtt

SEQ ID NO: 281391 - DNA, 25 bp, probe
tctcagctcttgacctcagaaagta

SEQ ID NO: 281392 - DNA, 25 bp, probe
tctcagttctacttatgacacctca

SEQ ID NO: 281393 - DNA, 25 bp, probe
tctcaatgatcaactctaacaactc

SEQ ID NO: 281394 - DNA, 25 bp, probe
tctcagaatctgatgctttctgatc

SEQ ID NO: 281395 - DNA, 25 bp, probe
tctagaattggtttgctctgatcat

SEQ ID NO: 281396 - DNA, 25 bp, probe
tctactaatagtttgcttccttcct

SEQ ID NO: 281397 - DNA, 25 bp, probe
tctcactttaatgctttcttgccct

SEQ ID NO: 281398 - DNA, 25 bp, probe
tctatttattaaatttctaccgctt

SEQ ID NO: 281399 - DNA, 25 bp, probe
tcttatttcaacatcctcaatcctg

SEQ ID NO: 281400 - DNA, 25 bp, probe
tctttttatagcgacattcctcccg

SEQ ID NO: 281401 - DNA, 25 bp, probe
ttgtgtctttcggaaaagccccgtg

SEQ ID NO: 281402 - DNA, 25 bp, probe
ttacttatttgcgtaaagcccggat

SEQ ID NO: 281403 - DNA, 25 bp, probe
tttctttcgtgttcaaaccacggag

SEQ ID NO: 281404 - DNA, 25 bp, probe
tttctttcgtgttcaaaccacggag

SEQ ID NO: 281405 - DNA, 25 bp, probe
tttttgcttgtgtacaaacccagat

SEQ ID NO: 281406 - DNA, 25 bp, probe
tcttcaccttgcacaaaaccaagaa

SEQ ID NO: 281407 - DNA, 25 bp, probe
tcttaacattgcagcaatcacctgc

SEQ ID NO: 281408 - DNA, 25 bp, probe
tctttccattcaccagaccattccg

SEQ ID NO: 281409 - DNA, 25 bp, probe
tttttcactgcctgacctttaaaag

SEQ ID NO: 281410 - DNA, 25 bp, probe
tctttccatcccaggcttttgaaaa

SEQ ID NO: 281411 - DNA, 25 bp, probe
tctattctttccaggctctttgtat

SEQ ID NO: 281412 - DNA, 25 bp, probe
tctacctgctgagcaagagtttcag

SEQ ID NO: 281413 - DNA, 25 bp, probe
tctacctgctgagcaagagtttcag

SEQ ID NO: 281414 - DNA, 25 bp, probe
tctatccattgagcacattttccta

SEQ ID NO: 281415 - DNA, 25 bp, probe
tctcactttgaggcacatttacatc

SEQ ID NO: 281416 - DNA, 25 bp, probe
tctcactttagtggatgtaaatgga

SEQ ID NO: 281417 - DNA, 25 bp, probe
tctcacctgttggaatgcactaatg

SEQ ID NO: 281418 - DNA, 25 bp, probe
tctagcctgcttgtgagctctagca

SEQ ID NO: 281419 - DNA, 25 bp, probe
tctaacttcagagtgcagtctacaa

SEQ ID NO: 281420 - DNA, 25 bp, probe
tctatacctagaagcagccagccca

SEQ ID NO: 281421 - DNA, 25 bp, probe
tctatccctgtaagtgcgcagacac

SEQ ID NO: 281422 - DNA, 25 bp, probe
tctacatcctgtttctccagaatga

SEQ ID NO: 281423 - DNA, 25 bp, probe
tctaccaatgtattgtccacagtca

SEQ ID NO: 281424 - DNA, 25 bp, probe
tctaccagagattttcctctccaat

SEQ ID NO: 281425 - DNA, 25 bp, probe
tctcacactgaatctttcctacaga

SEQ ID NO: 281426 - DNA, 25 bp, probe
tctcaccacaatttttctgctgcaa

SEQ ID NO: 281427 - DNA, 25 bp, probe
tctacgacctgagatctgctggctc

SEQ ID NO: 281428 - DNA, 25 bp, probe
tctacgacctgggcttgatgggcta

SEQ ID NO: 281429 - DNA, 25 bp, probe
tctactgacattagcactttgtaca

SEQ ID NO: 281430 - DNA, 25 bp, probe
tctagatggcaaagcccacttagca

SEQ ID NO: 281431 - DNA, 25 bp, probe
tctacgatgtcaagccgctcttaga

SEQ ID NO: 281432 - DNA, 25 bp, probe
tctacgtgctcaacatcgtcaacgt

SEQ ID NO: 281433 - DNA, 25 bp, probe
tctagggcacatactgagtgagagc

SEQ ID NO: 281434 - DNA, 25 bp, probe
tctagcagacagctctggacagaca

SEQ ID NO: 281435 - DNA, 25 bp, probe
tctagagcagcactgcccaacaaaa

SEQ ID NO: 281436 - DNA, 25 bp, probe
tctcagcaagacatcctacaagaga

SEQ ID NO: 281437 - DNA, 25 bp, probe
tctcagcatcagtatatcccatgca

SEQ ID NO: 281438 - DNA, 25 bp, probe
tctcaatgtgtaacacactgcagtt

SEQ ID NO: 281439 - DNA, 25 bp, probe
tctcaagctttgtacactggataaa

SEQ ID NO: 281440 - DNA, 25 bp, probe
tcatatcagtttggacctctgaaag

SEQ ID NO: 281441 - DNA, 25 bp, probe
tcttcagagtctgaccgtaagtaaa

SEQ ID NO: 281442 - DNA, 25 bp, probe
tctaaattgctgttccttaatttga

SEQ ID NO: 281443 - DNA, 25 bp, probe
tctaaagggaactgtgacatttcaa

SEQ ID NO: 281444 - DNA, 25 bp, probe
tcttacagggtaacggagatcttaa

SEQ ID NO: 281445 - DNA, 25 bp, probe
tttaaacaacatatgtaattttgaa

SEQ ID NO: 281446 - DNA, 25 bp, probe
ttcagaaaaaccagggatctttaat

SEQ ID NO: 281447 - DNA, 25 bp, probe
tctaaaaacctcaggtggctctgcc

SEQ ID NO: 281448 - DNA, 25 bp, probe
tcaaaaaactccaggctggcagcat

SEQ ID NO: 281449 - DNA, 25 bp, probe
tcatgtcaaaacggaaggcgtcaat

SEQ ID NO: 281450 - DNA, 25 bp, probe
tcttcaaagacacacgcggtcgtcc

SEQ ID NO: 281451 - DNA, 25 bp, probe
tttttgatagcacacatggggcccc

SEQ ID NO: 281452 - DNA, 25 bp, probe
tctttggctgaacatcgagaggccc

SEQ ID NO: 281453 - DNA, 25 bp, probe
tctttggagagggtcaagtctgctc

SEQ ID NO: 281454 - DNA, 25 bp, probe
tcttggtggagggctccaccctggc

SEQ ID NO: 281455 - DNA, 25 bp, probe
tctatgggaagcgcttcaccacggc

SEQ ID NO: 281456 - DNA, 25 bp, probe
ttgtgtccaacgattcggactcgga

SEQ ID NO: 281457 - DNA, 25 bp, probe
tctttccgacgcattcggaattccg

SEQ ID NO: 281458 - DNA, 25 bp, probe
tcttccacgaagttccggaagccct

SEQ ID NO: 281459 - DNA, 25 bp, probe
tctttcaggaagtcttccagcaacc

SEQ ID NO: 281460 - DNA, 25 bp, probe
tctttgcagagatggtgactcgaaa

SEQ ID NO: 281461 - DNA, 25 bp, probe
tctactgatggagtggggcgcggac

SEQ ID NO: 281462 - DNA, 25 bp, probe
tctactgaggggcctgtggcggtgc

SEQ ID NO: 281463 - DNA, 25 bp, probe
tctagtgcagggaccgtggctgcgt

SEQ ID NO: 281464 - DNA, 25 bp, probe
tctagagccaggacacagacctttt

SEQ ID NO: 281465 - DNA, 25 bp, probe
tcatcaactaggaaacctcaggctt

SEQ ID NO: 281466 - DNA, 25 bp, probe
tctcaacgatgcctatgacctggtc

SEQ ID NO: 281467 - DNA, 25 bp, probe
tctacatctgggaatgcacctcttc

SEQ ID NO: 281468 - DNA, 25 bp, probe
tctatcctggattctgaactcttca

SEQ ID NO: 281469 - DNA, 25 bp, probe
tctatggcagtgtttgaacagcatt

SEQ ID NO: 281470 - DNA, 25 bp, probe
tcttccagagaaataaagttagttt

SEQ ID NO: 281471 - DNA, 25 bp, probe
tcttttaaacggagtcttgctatat

SEQ ID NO: 281472 - DNA, 25 bp, probe
tctttctaaattgctgttccttaat

SEQ ID NO: 281473 - DNA, 25 bp, probe
tctttctaaattgctgttccttaat

SEQ ID NO: 281474 - DNA, 25 bp, probe
tctttctaccagagtttcccattag

SEQ ID NO: 281475 - DNA, 25 bp, probe
tctagtctatgcagtcgagttctcc

SEQ ID NO: 281476 - DNA, 25 bp, probe
tctagttacaggacggtttctttct

SEQ ID NO: 281477 - DNA, 25 bp, probe
tctagttacaggacggtttctttct

SEQ ID NO: 281478 - DNA, 25 bp, probe
taagtttagctgacccttccaggtc

SEQ ID NO: 281479 - DNA, 25 bp, probe
tctacgttatctgcatcacttccag

SEQ ID NO: 281480 - DNA, 25 bp, probe
tctatcgcatgtgccttcatcatca

SEQ ID NO: 281481 - DNA, 25 bp, probe
tctatcgcatgtgccttcatcatca

SEQ ID NO: 281482 - DNA, 25 bp, probe
tctacagcttcggcctaatcatttg

SEQ ID NO: 281483 - DNA, 25 bp, probe
tctacagcttcggcgtggttctgtt

SEQ ID NO: 281484 - DNA, 25 bp, probe
tctacacgctcaccgtgtttgcatg

SEQ ID NO: 281485 - DNA, 25 bp, probe
tctaagatgtgccctggtaactggc

SEQ ID NO: 281486 - DNA, 25 bp, probe
tctatcagctgggcatgcggtacct

SEQ ID NO: 281487 - DNA, 25 bp, probe
tctcactgctgggagtggaccatgc

SEQ ID NO: 281488 - DNA, 25 bp, probe
tctactgtgcagtattgccaccaga

SEQ ID NO: 281489 - DNA, 25 bp, probe
tctactgagctaatagccactagca

SEQ ID NO: 281490 - DNA, 25 bp, probe
tctaatttaatattcctggcatacc

SEQ ID NO: 281491 - DNA, 25 bp, probe
tctaattaaaattcttgcacaataa

SEQ ID NO: 281492 - DNA, 25 bp, probe
tctatttaagaatgcgtgggagaaa

SEQ ID NO: 281493 - DNA, 25 bp, probe
tctactaaatattagcggggtgtgg

SEQ ID NO: 281494 - DNA, 25 bp, probe
tctactttgtgttcctggtggtgag

SEQ ID NO: 281495 - DNA, 25 bp, probe
tctaattcgccctcagcatgtggga

SEQ ID NO: 281496 - DNA, 25 bp, probe
tctacttcagccgactctgggagga

SEQ ID NO: 281497 - DNA, 25 bp, probe
tctacttcagccgactctgggagga

SEQ ID NO: 281498 - DNA, 25 bp, probe
tctttagccccactcatgatggaag

SEQ ID NO: 281499 - DNA, 25 bp, probe
tcttttgcccacacttgggagcaaa

SEQ ID NO: 281500 - DNA, 25 bp, probe
tcttgtacggcctctcggatgagat

SEQ ID NO: 281501 - DNA, 25 bp, probe
tctttagatgtcgtatccggaggag

SEQ ID NO: 281502 - DNA, 25 bp, probe
tcattttgtacggatcacgggagca

SEQ ID NO: 281503 - DNA, 25 bp, probe
tactgtatgaactgctgacgggaat

SEQ ID NO: 281504 - DNA, 25 bp, probe
tcactgaactttgctgagcctgtaa

SEQ ID NO: 281505 - DNA, 25 bp, probe
tcttaacttcatgtgagctattgga

SEQ ID NO: 281506 - DNA, 25 bp, probe
tctatagcatatcctttggctttgg

SEQ ID NO: 281507 - DNA, 25 bp, probe
tctcaatctatttgctggagtctag

SEQ ID NO: 281508 - DNA, 25 bp, probe
tctagagtctaggatgaagctctga

SEQ ID NO: 281509 - DNA, 25 bp, probe
tctagagttttatagcctggactgc

SEQ ID NO: 281510 - DNA, 25 bp, probe
tcttgtattttataggcatggccat

SEQ ID NO: 281511 - DNA, 25 bp, probe
tcttgcttttttcagtcatttataa

SEQ ID NO: 281512 - DNA, 25 bp, probe
tctttggtttctcatcacatttgta

SEQ ID NO: 281513 - DNA, 25 bp, probe
tctttggtttctcatcacatttgta

SEQ ID NO: 281514 - DNA, 25 bp, probe
tctttgggtatttataattgtctgt

SEQ ID NO: 281515 - DNA, 25 bp, probe
tctttgggtatttataattgtctgt

SEQ ID NO: 281516 - DNA, 25 bp, probe
tcttttgtaatttaaatggctgcat

SEQ ID NO: 281517 - DNA, 25 bp, probe
tctttgtcataaatcacaataagta

SEQ ID NO: 281518 - DNA, 25 bp, probe
tctttgtcaatgctctaacaaaccg

SEQ ID NO: 281519 - DNA, 25 bp, probe
tcttcatttatgctcggccaaaggc

SEQ ID NO: 281520 - DNA, 25 bp, probe
tcttttcttcttgcagagcaagggc

SEQ ID NO: 281521 - DNA, 25 bp, probe
tcttttcttagaagggagaggctgc

SEQ ID NO: 281522 - DNA, 25 bp, probe
tctttgtctgggtgcggaggagctc

SEQ ID NO: 281523 - DNA, 25 bp, probe
tctttgatcgggtgctgacagagct

SEQ ID NO: 281524 - DNA, 25 bp, probe
tcttatatcctatggctacattgcc

SEQ ID NO: 281525 - DNA, 25 bp, probe
tctagtgtcactttttacttccttc

SEQ ID NO: 281526 - DNA, 25 bp, probe
tctacatgtaattaccttcttttgt

SEQ ID NO: 281527 - DNA, 25 bp, probe
tctacagtaaggacagtctctgctt

SEQ ID NO: 281528 - DNA, 25 bp, probe
tctagtgctggaagaagccctctct

SEQ ID NO: 281529 - DNA, 25 bp, probe
tctattgcaagaagatcacgacctt

SEQ ID NO: 281530 - DNA, 25 bp, probe
tctaagcaatacgaggccaccttca

SEQ ID NO: 281531 - DNA, 25 bp, probe
tctaagcaatacgaggccaccttca

SEQ ID NO: 281532 - DNA, 25 bp, probe
tctttgttactactatcaactgtca

SEQ ID NO: 281533 - DNA, 25 bp, probe
tctttgcttacagtgcatcacaact

SEQ ID NO: 281534 - DNA, 25 bp, probe
tctttgctttgcatatcaagttgcc

SEQ ID NO: 281535 - DNA, 25 bp, probe
tcatcaggctgtactttcaggttcc

SEQ ID NO: 281536 - DNA, 25 bp, probe
tcatcaggctgtactttcaggttcc

SEQ ID NO: 281537 - DNA, 25 bp, probe
tctaggtttgttactggcttcagaa

SEQ ID NO: 281538 - DNA, 25 bp, probe
tcttttttgtgtatggcaccagaag

SEQ ID NO: 281539 - DNA, 25 bp, probe
tctttatattgtcattgtcacaaca

SEQ ID NO: 281540 - DNA, 25 bp, probe
tctagttttctatgttctgatgatg

SEQ ID NO: 281541 - DNA, 25 bp, probe
tctaatctgttttgagtctttacaa

SEQ ID NO: 281542 - DNA, 25 bp, probe
tctaattatttaagattggaacaaa

SEQ ID NO: 281543 - DNA, 25 bp, probe
tctagacgtttactttgtagaaaca

SEQ ID NO: 281544 - DNA, 25 bp, probe
tctagggctttaaaagtcaagatga

SEQ ID NO: 281545 - DNA, 25 bp, probe
tctagggcttcgaaggtgtgcacct

SEQ ID NO: 281546 - DNA, 25 bp, probe
tctagtgacttcctggtgaggccca

SEQ ID NO: 281547 - DNA, 25 bp, probe
tctattcctgtgctggatgctgtgt

SEQ ID NO: 281548 - DNA, 25 bp, probe
tctttccggaggtcagtggtgggta

SEQ ID NO: 281549 - DNA, 25 bp, probe
tctttcattggagacggtttggtga

SEQ ID NO: 281550 - DNA, 25 bp, probe
tctttatccgggacctgtttttgag

SEQ ID NO: 281551 - DNA, 25 bp, probe
tcttttcctgaccaatcttgtttta

SEQ ID NO: 281552 - DNA, 25 bp, probe
tctttagggcacaattttttctgga

SEQ ID NO: 281553 - DNA, 25 bp, probe
tctttaaccctattatttacagtct

SEQ ID NO: 281554 - DNA, 25 bp, probe
tcttaaatgccagtagtatttagag

SEQ ID NO: 281555 - DNA, 25 bp, probe
tctacaaatcaggcatttattttga

SEQ ID NO: 281556 - DNA, 25 bp, probe
tctacattaatcagtgttttctgac

SEQ ID NO: 281557 - DNA, 25 bp, probe
tctactttattaattgttttgcact

SEQ ID NO: 281558 - DNA, 25 bp, probe
tctacgggtttgattatttagtcat

SEQ ID NO: 281559 - DNA, 25 bp, probe
tcttcgggttctatttctgtatgcc

SEQ ID NO: 281560 - DNA, 25 bp, probe
tctttgattttgtttttctgtctcc

SEQ ID NO: 281561 - DNA, 25 bp, probe
tctttatttatggtcgtgcccttcc

SEQ ID NO: 281562 - DNA, 25 bp, probe
tcttgtacaaagtggtgccgatatg

SEQ ID NO: 281563 - DNA, 25 bp, probe
tctagtgaacaaaaggtgcctattc

SEQ ID NO: 281564 - DNA, 25 bp, probe
tctagtggacagaacatgctgtgtt

SEQ ID NO: 281565 - DNA, 25 bp, probe
tctagatgaaagttctctggttcaa

SEQ ID NO: 281566 - DNA, 25 bp, probe
tctagatgaaagttctctggttcaa

SEQ ID NO: 281567 - DNA, 25 bp, probe
tctagtgaaacttatctgatggcat

SEQ ID NO: 281568 - DNA, 25 bp, probe
tctatgtgacaattttgtacaaatt

SEQ ID NO: 281569 - DNA, 25 bp, probe
tctattgacagatccttgcggcaat

SEQ ID NO: 281570 - DNA, 25 bp, probe
tctttggcactcttactgcctgtaa

SEQ ID NO: 281571 - DNA, 25 bp, probe
tctaccccactttatcacatgtaca

SEQ ID NO: 281572 - DNA, 25 bp, probe
tctactggcacaatttattattaaa

SEQ ID NO: 281573 - DNA, 25 bp, probe
tctactgctacatcttcatcttcag

SEQ ID NO: 281574 - DNA, 25 bp, probe
tctactcatatatatctatcttata

SEQ ID NO: 281575 - DNA, 25 bp, probe
tctacaatatgagccttctgaagca

SEQ ID NO: 281576 - DNA, 25 bp, probe
tctacacgagatcctctctctgaaa

SEQ ID NO: 281577 - DNA, 25 bp, probe
tctacctagcatgcattttacacac

SEQ ID NO: 281578 - DNA, 25 bp, probe
tctagtcttcataatttcttcactc

SEQ ID NO: 281579 - DNA, 25 bp, probe
tctaggtacatcaatttcacatcaa

SEQ ID NO: 281580 - DNA, 25 bp, probe
tctaggtacatcaatttcacatcaa

SEQ ID NO: 281581 - DNA, 25 bp, probe
tctatggtagaatttcccatgcatt

SEQ ID NO: 281582 - DNA, 25 bp, probe
tctagagtgaacttccacaccatac

SEQ ID NO: 281583 - DNA, 25 bp, probe
tctaggctgttcttggagcccacac

SEQ ID NO: 281584 - DNA, 25 bp, probe
tcttaagtgccaatgggcccacctt

SEQ ID NO: 281585 - DNA, 25 bp, probe
tcttctcatatggacgggctccgta

SEQ ID NO: 281586 - DNA, 25 bp, probe
tctaggcatcaccacggtgctgacg

SEQ ID NO: 281587 - DNA, 25 bp, probe
tctaggctcggatcagctgctacag

SEQ ID NO: 281588 - DNA, 25 bp, probe
tctatgtactagtactgtgtactgt

SEQ ID NO: 281589 - DNA, 25 bp, probe
tctactacacaggcctgataactct

SEQ ID NO: 281590 - DNA, 25 bp, probe
tctattagacagccctgcttgagcc

SEQ ID NO: 281591 - DNA, 25 bp, probe
tctatgtcacctccagtgactaccg

SEQ ID NO: 281592 - DNA, 25 bp, probe
tctttacctccagggatcagctgtg

SEQ ID NO: 281593 - DNA, 25 bp, probe
tctttgagcgcgctgagcgtcacgg

SEQ ID NO: 281594 - DNA, 25 bp, probe
tctttgcattccttacttgcactgt

SEQ ID NO: 281595 - DNA, 25 bp, probe
tctactttcgcaatcacttctgcat

SEQ ID NO: 281596 - DNA, 25 bp, probe
tctactcttcaccacgatatcatgt

SEQ ID NO: 281597 - DNA, 25 bp, probe
tctactcttcaccacgatatcatgt

SEQ ID NO: 281598 - DNA, 25 bp, probe
tctagcacccaccagtgcagacatg

SEQ ID NO: 281599 - DNA, 25 bp, probe
tctatgccccacagtgaccagtaaa

SEQ ID NO: 281600 - DNA, 25 bp, probe
tctatgccccacagtgaccagtaaa

SEQ ID NO: 281601 - DNA, 25 bp, probe
tcttctattcacagtacacgtcaca

SEQ ID NO: 281602 - DNA, 25 bp, probe
tctttttcctttagccttagcagtg

SEQ ID NO: 281603 - DNA, 25 bp, probe
tctttattactttatggcttcagag

SEQ ID NO: 281604 - DNA, 25 bp, probe
tctttctaatcttgctggtttcaag

SEQ ID NO: 281605 - DNA, 25 bp, probe
tcttcaccaccatttcagtttcagg

SEQ ID NO: 281606 - DNA, 25 bp, probe
tcttatgccacgggaagtttagaga

SEQ ID NO: 281607 - DNA, 25 bp, probe
tcatatggcccagtgtcaagttgtg

SEQ ID NO: 281608 - DNA, 25 bp, probe
tcagtaccgacgtacacttctgacc

SEQ ID NO: 281609 - DNA, 25 bp, probe
tcagtaccgacgtacacttctgacc

SEQ ID NO: 281610 - DNA, 25 bp, probe
tcagaaccaatatttcactgtcgac

SEQ ID NO: 281611 - DNA, 25 bp, probe
tctacactcaggacttcacggtgcc

SEQ ID NO: 281612 - DNA, 25 bp, probe
tctacactcaggacttcacggtgcc

SEQ ID NO: 281613 - DNA, 25 bp, probe
tctacctatgaactacggactgcac

SEQ ID NO: 281614 - DNA, 25 bp, probe
tctacctatgaactacggactgcac

SEQ ID NO: 281615 - DNA, 25 bp, probe
tctacctgaacatccagaggcgcac

SEQ ID NO: 281616 - DNA, 25 bp, probe
tctacttgaagtcctgaagctcgcc

SEQ ID NO: 281617 - DNA, 25 bp, probe
tctacgagaagctgctgacagccgt

SEQ ID NO: 281618 - DNA, 25 bp, probe
tctactgagatctgggactgctttg

SEQ ID NO: 281619 - DNA, 25 bp, probe
tctaccagaccacagttgctgttgt

SEQ ID NO: 281620 - DNA, 25 bp, probe
tctacaccacgcaaagtgatgtatg

SEQ ID NO: 281621 - DNA, 25 bp, probe
tctacgccaagcattatgtgctgtg

SEQ ID NO: 281622 - DNA, 25 bp, probe
tctacaccagagagtgctgccatgg

SEQ ID NO: 281623 - DNA, 25 bp, probe
tctacagcagcaagaggagtccaag

SEQ ID NO: 281624 - DNA, 25 bp, probe
tctatagcagcacaggttggtacaa

SEQ ID NO: 281625 - DNA, 25 bp, probe
tcttctatgccctgttgggcatccc

SEQ ID NO: 281626 - DNA, 25 bp, probe
tcttcatccacgtttgtggacacca

SEQ ID NO: 281627 - DNA, 25 bp, probe
tctagaacaggtcggtggccacaca

SEQ ID NO: 281628 - DNA, 25 bp, probe
tctagataacctcgggccgatcgca

SEQ ID NO: 281629 - DNA, 25 bp, probe
tctagaacaccaccagaggcagcaa

SEQ ID NO: 281630 - DNA, 25 bp, probe
tctttggccaagtagtggcagccat

SEQ ID NO: 281631 - DNA, 25 bp, probe
tctattgtgccaaggttgccagcgt

SEQ ID NO: 281632 - DNA, 25 bp, probe
tctatttcatattaattccaggtga

SEQ ID NO: 281633 - DNA, 25 bp, probe
tcttattcctcttttccaagtcaaa

SEQ ID NO: 281634 - DNA, 25 bp, probe
tctttctcctctgatttcagttcac

SEQ ID NO: 281635 - DNA, 25 bp, probe
tctagtatccttggtattcattcca

SEQ ID NO: 281636 - DNA, 25 bp, probe
tcttggatccttgggtttacctgct

SEQ ID NO: 281637 - DNA, 25 bp, probe
tcttcatgttcattgggtttatcct

SEQ ID NO: 281638 - DNA, 25 bp, probe
tctttcttcttacgctgtgttaatg

SEQ ID NO: 281639 - DNA, 25 bp, probe
tctttctttcagctgcaggctttga

SEQ ID NO: 281640 - DNA, 25 bp, probe
tcttcagtcgatatatgggctattg

SEQ ID NO: 281641 - DNA, 25 bp, probe
tcttcaagcgagctagcccttgtga

SEQ ID NO: 281642 - DNA, 25 bp, probe
tctttacaaaatagccagttataaa

SEQ ID NO: 281643 - DNA, 25 bp, probe
tctttgaaactgtatcacctttgcc

SEQ ID NO: 281644 - DNA, 25 bp, probe
tcttcaagaacttcaacctctttct

SEQ ID NO: 281645 - DNA, 25 bp, probe
tcttacaagttatactcttatttgg

SEQ ID NO: 281646 - DNA, 25 bp, probe
ttcaaaggtttctcctactttggtg

SEQ ID NO: 281647 - DNA, 25 bp, probe
tttaaattttcacacgactttcgtg

SEQ ID NO: 281648 - DNA, 25 bp, probe
tcttaattgtaagcaaaactttggg

SEQ ID NO: 281649 - DNA, 25 bp, probe
tcttacattgttctctgtaactctt

SEQ ID NO: 281650 - DNA, 25 bp, probe
tctacttctggtcatgcttacactg

SEQ ID NO: 281651 - DNA, 25 bp, probe
tctacttctggatctgctatgtctt

SEQ ID NO: 281652 - DNA, 25 bp, probe
tctacttctgaagtcaggttgcttg

SEQ ID NO: 281653 - DNA, 25 bp, probe
tctacttctgaagtcaggttgcttg

SEQ ID NO: 281654 - DNA, 25 bp, probe
tctaccacagcatccaggatctgtc

SEQ ID NO: 281655 - DNA, 25 bp, probe
tctagttagatctgcagaatgtggc

SEQ ID NO: 281656 - DNA, 25 bp, probe
tctactgttgcttaattatgatgga

SEQ ID NO: 281657 - DNA, 25 bp, probe
tctactgttgcttaattatgatgga

SEQ ID NO: 281658 - DNA, 25 bp, probe
tctactgcttcttcaatggagaggt

SEQ ID NO: 281659 - DNA, 25 bp, probe
tctacctgtgctacataggagaagt

SEQ ID NO: 281660 - DNA, 25 bp, probe
tctacccatgctccagcaaggagtt

SEQ ID NO: 281661 - DNA, 25 bp, probe
tctagacggcatccagccggaggcc

SEQ ID NO: 281662 - DNA, 25 bp, probe
tctagacggcatccagccggaggcc

SEQ ID NO: 281663 - DNA, 25 bp, probe
tctagacacagcacggcaggagacc

SEQ ID NO: 281664 - DNA, 25 bp, probe
tcttgcaaagcacaagctgggaccg

SEQ ID NO: 281665 - DNA, 25 bp, probe
tcttcaacagggagctgagggactg

SEQ ID NO: 281666 - DNA, 25 bp, probe
tcttagaatcctgagctgtggtggc

SEQ ID NO: 281667 - DNA, 25 bp, probe
tcttcagaaccctatctgggagaga

SEQ ID NO: 281668 - DNA, 25 bp, probe
tcttcgagtccgtcacgtgggagaa

SEQ ID NO: 281669 - DNA, 25 bp, probe
tcttcggtcatgcactttgggatac

SEQ ID NO: 281670 - DNA, 25 bp, probe
tctttagtatattcttgggtgtggc

SEQ ID NO: 281671 - DNA, 25 bp, probe
tctttagtatattcttgggtgtggc

SEQ ID NO: 281672 - DNA, 25 bp, probe
tctttgggtgatcaagggtgtggtt

SEQ ID NO: 281673 - DNA, 25 bp, probe
tctttggcgagctgaacgtgtggcg

SEQ ID NO: 281674 - DNA, 25 bp, probe
tctttggcgagctgaacgtgtggcg

SEQ ID NO: 281675 - DNA, 25 bp, probe
tctttgagcttgtggaggtggtcgg

SEQ ID NO: 281676 - DNA, 25 bp, probe
tcttccagcttttgggacttggggg

SEQ ID NO: 281677 - DNA, 25 bp, probe
tcttcgagtatatgcggcacgggga

SEQ ID NO: 281678 - DNA, 25 bp, probe
tcttggggtatccggggtgcggaca

SEQ ID NO: 281679 - DNA, 25 bp, probe
tcttggggtatccggggtgcggaca

SEQ ID NO: 281680 - DNA, 25 bp, probe
tcttgcggggcaaggggtgggctca

SEQ ID NO: 281681 - DNA, 25 bp, probe
tctatggacgacagcccggagctgc

SEQ ID NO: 281682 - DNA, 25 bp, probe
tctatggacgacagcccggagctgc

SEQ ID NO: 281683 - DNA, 25 bp, probe
tctataacagtcacccttggagccc

SEQ ID NO: 281684 - DNA, 25 bp, probe
tctataacagtcacccttggagccc

SEQ ID NO: 281685 - DNA, 25 bp, probe
tctaccacattgtccgctttgtggc

SEQ ID NO: 281686 - DNA, 25 bp, probe
tcatcaaccttgtcccgttgtgtta

SEQ ID NO: 281687 - DNA, 25 bp, probe
tcaacttctatcaccgttggtttga

SEQ ID NO: 281688 - DNA, 25 bp, probe
tcagacttttctctcagttgggatg

SEQ ID NO: 281689 - DNA, 25 bp, probe
tcttgctaccctcttttgaagatgt

SEQ ID NO: 281690 - DNA, 25 bp, probe
tcttcttacgctgtgttaatgtgtt

SEQ ID NO: 281691 - DNA, 25 bp, probe
tcattttcacctccatttcttggtt

SEQ ID NO: 281692 - DNA, 25 bp, probe
tcattttcacctccatttcttggtt

SEQ ID NO: 281693 - DNA, 25 bp, probe
tctttacctcttgctattttgttat

SEQ ID NO: 281694 - DNA, 25 bp, probe
tcttataaccgtgcttctttcatgt

SEQ ID NO: 281695 - DNA, 25 bp, probe
tcttcatgaaatgtgttttgtcttt

SEQ ID NO: 281696 - DNA, 25 bp, probe
tcttctacgggaccttattcttcat

SEQ ID NO: 281697 - DNA, 25 bp, probe
tcttctacgggaccttattcttcat

SEQ ID NO: 281698 - DNA, 25 bp, probe
tctttgtgtgtgaactcctatactt

SEQ ID NO: 281699 - DNA, 25 bp, probe
tctatgagtttgatcacctgatttt

SEQ ID NO: 281700 - DNA, 25 bp, probe
tctttgtttttggcttgatttttca

SEQ ID NO: 281701 - DNA, 25 bp, probe
tctattgtctccttggttatatttt

SEQ ID NO: 281702 - DNA, 25 bp, probe
tctttgtccacgtttaatactttgt

SEQ ID NO: 281703 - DNA, 25 bp, probe
tcttttcccttttaagactctgttg

SEQ ID NO: 281704 - DNA, 25 bp, probe
tctttcccacctaaaaatgtctgaa

SEQ ID NO: 281705 - DNA, 25 bp, probe
tcttgtccaacctacaaaagtttgg

SEQ ID NO: 281706 - DNA, 25 bp, probe
tcttgtccaacctacaaaagtttgg

SEQ ID NO: 281707 - DNA, 25 bp, probe
tctttctaaccctagctaactttag

SEQ ID NO: 281708 - DNA, 25 bp, probe
tctttctaaccctagctaactttag

SEQ ID NO: 281709 - DNA, 25 bp, probe
tctttcagtattaaactctcctttg

SEQ ID NO: 281710 - DNA, 25 bp, probe
tcttttatctttagacttcacttgt

SEQ ID NO: 281711 - DNA, 25 bp, probe
tctttcttctctaccactatagttt

SEQ ID NO: 281712 - DNA, 25 bp, probe
tcttcctgtcttaccaaacagtggg

SEQ ID NO: 281713 - DNA, 25 bp, probe
tcttcatttttagaaatgcctgtga

SEQ ID NO: 281714 - DNA, 25 bp, probe
tcttcatttttagaaatgcctgtga

SEQ ID NO: 281715 - DNA, 25 bp, probe
tcattatgtttgcaaagcccctggt

SEQ ID NO: 281716 - DNA, 25 bp, probe
tcatagaacattgagaggcccctgc

SEQ ID NO: 281717 - DNA, 25 bp, probe
tctagagtcagtgaagcaccccttt

SEQ ID NO: 281718 - DNA, 25 bp, probe
tctagaatcgctcaaacacctgttt

SEQ ID NO: 281719 - DNA, 25 bp, probe
tctagagtcagtcattatgaaatgt

SEQ ID NO: 281720 - DNA, 25 bp, probe
tctagtgtttcatcttcataattaa

SEQ ID NO: 281721 - DNA, 25 bp, probe
tctaggatgttcacttcttctccac

SEQ ID NO: 281722 - DNA, 25 bp, probe
tctaggcattgttctctttggatcc

SEQ ID NO: 281723 - DNA, 25 bp, probe
tcatcacgcttagcatcgtgctgga

SEQ ID NO: 281724 - DNA, 25 bp, probe
tcttccttacctcatctggattaat

SEQ ID NO: 281725 - DNA, 25 bp, probe
tcattccaaacctctgctagttcag

SEQ ID NO: 281726 - DNA, 25 bp, probe
tcttccaaagaagtagctcatttcg

SEQ ID NO: 281727 - DNA, 25 bp, probe
tcttccaaagaagtagctcatttcg

SEQ ID NO: 281728 - DNA, 25 bp, probe
tcttacagaaagatagttatccaga

SEQ ID NO: 281729 - DNA, 25 bp, probe
tcttatgtgaaaactggttcctcag

SEQ ID NO: 281730 - DNA, 25 bp, probe
tcttttgttataggggccccagcca

SEQ ID NO: 281731 - DNA, 25 bp, probe
tcttttttattggcggctccatggc

SEQ ID NO: 281732 - DNA, 25 bp, probe
tctttcttgttatgacctctagcgc

SEQ ID NO: 281733 - DNA, 25 bp, probe
tctttgttattgtcagaacctggtg

SEQ ID NO: 281734 - DNA, 25 bp, probe
tcttctgttgcaggactaacctttg

SEQ ID NO: 281735 - DNA, 25 bp, probe
tctttcttcgtgagacacgttatga

SEQ ID NO: 281736 - DNA, 25 bp, probe
tcttccttatgtgtaacgtttgatt

SEQ ID NO: 281737 - DNA, 25 bp, probe
tcttcatctttccactaacgtacta

SEQ ID NO: 281738 - DNA, 25 bp, probe
tcttcatctttccactaacgtacta

SEQ ID NO: 281739 - DNA, 25 bp, probe
tcttcccttcaagagcacttcacat

SEQ ID NO: 281740 - DNA, 25 bp, probe
tctacccctcaagtcattcatttat

SEQ ID NO: 281741 - DNA, 25 bp, probe
tctatccctggggtcactcatttat

SEQ ID NO: 281742 - DNA, 25 bp, probe
tctaccaggcagcgaagctctctta

SEQ ID NO: 281743 - DNA, 25 bp, probe
tctaccaggcagcgaagctctctta

SEQ ID NO: 281744 - DNA, 25 bp, probe
tctacctgcggcagccgtactatgc

SEQ ID NO: 281745 - DNA, 25 bp, probe
tcttcactgggcacctggatccagg

SEQ ID NO: 281746 - DNA, 25 bp, probe
tcttacttggtggccatgtacttgg

SEQ ID NO: 281747 - DNA, 25 bp, probe
tctatacttaatcccatgtcatgcg

SEQ ID NO: 281748 - DNA, 25 bp, probe
tctatcatttcagcttcttcatggc

SEQ ID NO: 281749 - DNA, 25 bp, probe
tctatgcatttgggactgtttggta

SEQ ID NO: 281750 - DNA, 25 bp, probe
tcttcttcatccacgtcattggtgg

SEQ ID NO: 281751 - DNA, 25 bp, probe
tctttctctcggccaggaattgtgg

SEQ ID NO: 281752 - DNA, 25 bp, probe
tctttctctcggccaggaattgtgg

SEQ ID NO: 281753 - DNA, 25 bp, probe
tcttttctctgtcagcgaacgtggc

SEQ ID NO: 281754 - DNA, 25 bp, probe
tctttgtccacacgcctaacaggac

SEQ ID NO: 281755 - DNA, 25 bp, probe
tcttcgtgctcacgggctacaagtt

SEQ ID NO: 281756 - DNA, 25 bp, probe
tcttccctaagccataaactgtctc

SEQ ID NO: 281757 - DNA, 25 bp, probe
tcttccctaagccataaactgtctc

SEQ ID NO: 281758 - DNA, 25 bp, probe
tcttctggctgtccaagaacctgtc

SEQ ID NO: 281759 - DNA, 25 bp, probe
tcttctggctgtccaagaacctgtc

SEQ ID NO: 281760 - DNA, 25 bp, probe
tcttcgtggagtcagaactgcctct

SEQ ID NO: 281761 - DNA, 25 bp, probe
tcttcagtggttcccattgattctc

SEQ ID NO: 281762 - DNA, 25 bp, probe
tcttcagtggttcccattgattctc

SEQ ID NO: 281763 - DNA, 25 bp, probe
tcttcaaggtctcttttcatccttc

SEQ ID NO: 281764 - DNA, 25 bp, probe
tcttagcccttggtgtttcattgtt

SEQ ID NO: 281765 - DNA, 25 bp, probe
tcttcacccttttgtcaaattgtta

SEQ ID NO: 281766 - DNA, 25 bp, probe
tcttcacccttttgtcaaattgtta

SEQ ID NO: 281767 - DNA, 25 bp, probe
tcttcaccgtgttaacataatctat

SEQ ID NO: 281768 - DNA, 25 bp, probe
tcttcacacagaattgctacaatcc

SEQ ID NO: 281769 - DNA, 25 bp, probe
tcttgtcagacaatggctataaact

SEQ ID NO: 281770 - DNA, 25 bp, probe
tctttatctcagaccttaaccttac

SEQ ID NO: 281771 - DNA, 25 bp, probe
tctttactgtgtgctgtaactctcc

SEQ ID NO: 281772 - DNA, 25 bp, probe
tcttcttggtctactgtgaactctt

SEQ ID NO: 281773 - DNA, 25 bp, probe
tcttccggatctttcggactctggg

SEQ ID NO: 281774 - DNA, 25 bp, probe
tcttccaggattcacggtgcacatg

SEQ ID NO: 281775 - DNA, 25 bp, probe
tcttccaggattcatggtgcctctg

SEQ ID NO: 281776 - DNA, 25 bp, probe
tcttccagctgctaaaaggcctcgg

SEQ ID NO: 281777 - DNA, 25 bp, probe
tcttcgacgccatcgcggagattgg

SEQ ID NO: 281778 - DNA, 25 bp, probe
tcttcaaccggagaggagagctgcg

SEQ ID NO: 281779 - DNA, 25 bp, probe
tttaaccaagaagacggctgcggag

SEQ ID NO: 281780 - DNA, 25 bp, probe
tcttataccaagggcaagcggctgc

SEQ ID NO: 281781 - DNA, 25 bp, probe
tcttcaacatcaacttctacgcagg

SEQ ID NO: 281782 - DNA, 25 bp, probe
tctataatgtgaactttcccctgtt

SEQ ID NO: 281783 - DNA, 25 bp, probe
tcttcacgaaacaaatcccctgtgt

SEQ ID NO: 281784 - DNA, 25 bp, probe
tcttgccaaaatatatctctgcctt

SEQ ID NO: 281785 - DNA, 25 bp, probe
tcttagccagaaatgtcttgcctct

SEQ ID NO: 281786 - DNA, 25 bp, probe
tcttctgtagaatgtttgacttcgt

SEQ ID NO: 281787 - DNA, 25 bp, probe
tcttggtagcctggtcttcattgtc

SEQ ID NO: 281788 - DNA, 25 bp, probe
tcttggaaccgggctatgttgactc

SEQ ID NO: 281789 - DNA, 25 bp, probe
tcttggttctcagcttagctaagtc

SEQ ID NO: 281790 - DNA, 25 bp, probe
tcttggcctcatctcatatactgaa

SEQ ID NO: 281791 - DNA, 25 bp, probe
tctatggtttctacgatgagtgcaa

SEQ ID NO: 281792 - DNA, 25 bp, probe
tctagtgatcttttgcatcatgagt

SEQ ID NO: 281793 - DNA, 25 bp, probe
tctttgtcatcttggcatcagcagg

SEQ ID NO: 281794 - DNA, 25 bp, probe
tctttgtcatcttggcatcagcagg

SEQ ID NO: 281795 - DNA, 25 bp, probe
tctttgtgtctccagcatctagtac

SEQ ID NO: 281796 - DNA, 25 bp, probe
tcttgtggtctggactgaacttcca

SEQ ID NO: 281797 - DNA, 25 bp, probe
tcttggtgccaccattgagaactcc

SEQ ID NO: 281798 - DNA, 25 bp, probe
tctatggccccatgaagaactacct

SEQ ID NO: 281799 - DNA, 25 bp, probe
tctatggccctgcaaaaatataacc

SEQ ID NO: 281800 - DNA, 25 bp, probe
tctatgccctgcagagcaataacac

SEQ ID NO: 281801 - DNA, 25 bp, probe
tctagctcccattggctgaagacac

SEQ ID NO: 281802 - DNA, 25 bp, probe
taggcccctgggacaatgacccaga

SEQ ID NO: 281803 - DNA, 25 bp, probe
tcttgctgccctcttaaaccagcag

SEQ ID NO: 281804 - DNA, 25 bp, probe
tcttcatttcccataacatcccaga

SEQ ID NO: 281805 - DNA, 25 bp, probe
tctttggatccagcaaaaaccaagg

SEQ ID NO: 281806 - DNA, 25 bp, probe
tcatttggaacagtctacaagggaa

SEQ ID NO: 281807 - DNA, 25 bp, probe
tcactagcgtacatctaaggaaaac

SEQ ID NO: 281808 - DNA, 25 bp, probe
tcttacttagcttccagtccaaacc

SEQ ID NO: 281809 - DNA, 25 bp, probe
tcttacataatttgcaatttcagga

SEQ ID NO: 281810 - DNA, 25 bp, probe
tcttccatagctctgcagattcttg

SEQ ID NO: 281811 - DNA, 25 bp, probe
tcttccatgtctctaatgttagtac

SEQ ID NO: 281812 - DNA, 25 bp, probe
tcttacgtcagcctccagagtagct

SEQ ID NO: 281813 - DNA, 25 bp, probe
tcttcaagccagctccagaggagga

SEQ ID NO: 281814 - DNA, 25 bp, probe
tcttcgaacgcatcgcaggtgaggc

SEQ ID NO: 281815 - DNA, 25 bp, probe
tcttcaggaccaccaactggcaagc

SEQ ID NO: 281816 - DNA, 25 bp, probe
tcttcaggaccaccaactggcaagc

SEQ ID NO: 281817 - DNA, 25 bp, probe
tcttcaggaccaccaactggcaagc

SEQ ID NO: 281818 - DNA, 25 bp, probe
tctatcagtacgtcggcaatggaag

SEQ ID NO: 281819 - DNA, 25 bp, probe
tctatgaaatcgtcgcttcttgaag

SEQ ID NO: 281820 - DNA, 25 bp, probe
tctatgtccatcaccttcttggaga

SEQ ID NO: 281821 - DNA, 25 bp, probe
tctttgcctgtatatttgtggtgac

SEQ ID NO: 281822 - DNA, 25 bp, probe
tcttcctgcttatatttaggaacat

SEQ ID NO: 281823 - DNA, 25 bp, probe
tctttttatactattaatgaatcaa

SEQ ID NO: 281824 - DNA, 25 bp, probe
tcttgtctacattcttttaagaagc

SEQ ID NO: 281825 - DNA, 25 bp, probe
tctattcgtcattcaattgctggaa

SEQ ID NO: 281826 - DNA, 25 bp, probe
tctattcgtcattcaattgctggaa

SEQ ID NO: 281827 - DNA, 25 bp, probe
tctatcctgagcttctggctggtga

SEQ ID NO: 281828 - DNA, 25 bp, probe
tctattctgtgcgcaggcggcagaa

SEQ ID NO: 281829 - DNA, 25 bp, probe
tctatgtcttcgtgggggtcaagtt

SEQ ID NO: 281830 - DNA, 25 bp, probe
tcttcatctgtccagttggggtagg

SEQ ID NO: 281831 - DNA, 25 bp, probe
tcttgactgctctgtttgggtggga

SEQ ID NO: 281832 - DNA, 25 bp, probe
tcttcattctctcggtatagttttg

SEQ ID NO: 281833 - DNA, 25 bp, probe
tcttttgcatcatgagtattttact

SEQ ID NO: 281834 - DNA, 25 bp, probe
tcttcattgacatttgtctctaaat

SEQ ID NO: 281835 - DNA, 25 bp, probe
tctttatggctactttcttacatgt

SEQ ID NO: 281836 - DNA, 25 bp, probe
tctttatggctactttcttacatgt

SEQ ID NO: 281837 - DNA, 25 bp, probe
tcttggatattacttatgtctaatt

SEQ ID NO: 281838 - DNA, 25 bp, probe
tcttgggttaatccatgttcaattc

SEQ ID NO: 281839 - DNA, 25 bp, probe
tcttggagtgctcatgtttgaagat

SEQ ID NO: 281840 - DNA, 25 bp, probe
tctatgccacagcaatgcttttaat

SEQ ID NO: 281841 - DNA, 25 bp, probe
tctatgacacttctgttgtgtattt

SEQ ID NO: 281842 - DNA, 25 bp, probe
tctatccactgtatttccacatcgt

SEQ ID NO: 281843 - DNA, 25 bp, probe
tctttgcctaaggtgtcctacgtga

SEQ ID NO: 281844 - DNA, 25 bp, probe
tctttgcctaaggtgtcctacgtga

SEQ ID NO: 281845 - DNA, 25 bp, probe
tcataatgccttcagtaccgacgta

SEQ ID NO: 281846 - DNA, 25 bp, probe
tcataatgccttcagtaccgacgta

SEQ ID NO: 281847 - DNA, 25 bp, probe
tctatacgcttttggtcggacgata

SEQ ID NO: 281848 - DNA, 25 bp, probe
tcttacgctatttctgttggttagt

SEQ ID NO: 281849 - DNA, 25 bp, probe
tctttggttgtgttgctcagtgtgt

SEQ ID NO: 281850 - DNA, 25 bp, probe
tctttgagttgtggtggacgctggc

SEQ ID NO: 281851 - DNA, 25 bp, probe
tctattgcgtggtgggcagccatga

SEQ ID NO: 281852 - DNA, 25 bp, probe
taattggtcatgtgatgcaagccag

SEQ ID NO: 281853 - DNA, 25 bp, probe
tctttctcctgtggacaagccagtg

SEQ ID NO: 281854 - DNA, 25 bp, probe
tctttcaacggaccagggcctggtg

SEQ ID NO: 281855 - DNA, 25 bp, probe
tctttccacaaacagtggcactccc

SEQ ID NO: 281856 - DNA, 25 bp, probe
tcttaccatgcacacgggtgctctc

SEQ ID NO: 281857 - DNA, 25 bp, probe
tcttaccatgcacacgggtgctctc

SEQ ID NO: 281858 - DNA, 25 bp, probe
tctatatcttcaggcgcgcggtctg

SEQ ID NO: 281859 - DNA, 25 bp, probe
tctttcgacatgggcgtggctgatg

SEQ ID NO: 281860 - DNA, 25 bp, probe
tcttattgactgggagactgtgctc

SEQ ID NO: 281861 - DNA, 25 bp, probe
tcttaatagctgttcgcctggcttc

SEQ ID NO: 281862 - DNA, 25 bp, probe
tcttaatagctgttcgcctggcttc

SEQ ID NO: 281863 - DNA, 25 bp, probe
tcttcttagtgtgccacttgcttgc

SEQ ID NO: 281864 - DNA, 25 bp, probe
tctttgtagtgtcccagctaaggcc

SEQ ID NO: 281865 - DNA, 25 bp, probe
tctttgtagtgtcccagctaaggcc

SEQ ID NO: 281866 - DNA, 25 bp, probe
tcttctgtagggagcagtaagcagc

SEQ ID NO: 281867 - DNA, 25 bp, probe
tcttcattggggttggttgctgctg

SEQ ID NO: 281868 - DNA, 25 bp, probe
tcttcgtggcggtcatggaattcat

SEQ ID NO: 281869 - DNA, 25 bp, probe
tcttcagtggcaccctcagaaaaat

SEQ ID NO: 281870 - DNA, 25 bp, probe
tcttactgttctctcagataataaa

SEQ ID NO: 281871 - DNA, 25 bp, probe
tcttccatcctcagtaattaagaag

SEQ ID NO: 281872 - DNA, 25 bp, probe
ttctactggcttgtaatttagggaa

SEQ ID NO: 281873 - DNA, 25 bp, probe
tcttcatcttggggtaattacaggc

SEQ ID NO: 281874 - DNA, 25 bp, probe
tcttctactggcttgtaatttaggg

SEQ ID NO: 281875 - DNA, 25 bp, probe
tctttgcagtggcttaatgtttgaa

SEQ ID NO: 281876 - DNA, 25 bp, probe
tcttggcagtgtccgtggttgctaa

SEQ ID NO: 281877 - DNA, 25 bp, probe
tcttatggtgatgcttattctgtac

SEQ ID NO: 281878 - DNA, 25 bp, probe
tctttgggtcaggagcattcatgta

SEQ ID NO: 281879 - DNA, 25 bp, probe
tctttgtggagcgtgacattctcac

SEQ ID NO: 281880 - DNA, 25 bp, probe
tctattggacaagttatgcctaata

SEQ ID NO: 281881 - DNA, 25 bp, probe
tctattcaccaatttctactggata

SEQ ID NO: 281882 - DNA, 25 bp, probe
tcttctcccatattattcagctcga

SEQ ID NO: 281883 - DNA, 25 bp, probe
tcttacctcatagaccttcaaggac

SEQ ID NO: 281884 - DNA, 25 bp, probe
tctatgaccactgccacactaaaaa

SEQ ID NO: 281885 - DNA, 25 bp, probe
tctatgtccagggccatcaacctaa

SEQ ID NO: 281886 - DNA, 25 bp, probe
tctatctgagcgcatctatcaaccc

SEQ ID NO: 281887 - DNA, 25 bp, probe
tctatctgagcgcatctatcaaccc

SEQ ID NO: 281888 - DNA, 25 bp, probe
tcttcagagatgctcccaaagctgc

SEQ ID NO: 281889 - DNA, 25 bp, probe
tcttcagagatgctcccaaagctgc

SEQ ID NO: 281890 - DNA, 25 bp, probe
tctttgagctgctcccaagagcacg

SEQ ID NO: 281891 - DNA, 25 bp, probe
tcttccagctgctgatcgaagaaaa

SEQ ID NO: 281892 - DNA, 25 bp, probe
tcttcctgagtggtgccaaacaaaa

SEQ ID NO: 281893 - DNA, 25 bp, probe
tcattctccttgggccgtgaaaaag

SEQ ID NO: 281894 - DNA, 25 bp, probe
tcttctccgtgcaacctggaaagtt

SEQ ID NO: 281895 - DNA, 25 bp, probe
tcttctacttcacccagaagaagtt

SEQ ID NO: 281896 - DNA, 25 bp, probe
tcttctccccttcaggatgcaagtt

SEQ ID NO: 281897 - DNA, 25 bp, probe
tcttctccactcagatagcgcatga

SEQ ID NO: 281898 - DNA, 25 bp, probe
tcttctccactcagatagcgcatga

SEQ ID NO: 281899 - DNA, 25 bp, probe
tcttttcactgcagtggggcagagt

SEQ ID NO: 281900 - DNA, 25 bp, probe
tcttactctgtcattacccagagat

SEQ ID NO: 281901 - DNA, 25 bp, probe
tcttgacttgtcaattactaccctt

SEQ ID NO: 281902 - DNA, 25 bp, probe
tcttgactacttggaactaggctct

SEQ ID NO: 281903 - DNA, 25 bp, probe
tcttcatctgggagacactcatggc

SEQ ID NO: 281904 - DNA, 25 bp, probe
tcttctttcagaggagcgcctgggg

SEQ ID NO: 281905 - DNA, 25 bp, probe
tcttctacgtgatgaccctgagcgg

SEQ ID NO: 281906 - DNA, 25 bp, probe
tcttaacgatgaccacccagagttc

SEQ ID NO: 281907 - DNA, 25 bp, probe
tcttttccatgatcatctacacagt

SEQ ID NO: 281908 - DNA, 25 bp, probe
tcttttccatgatcatctacacagt

SEQ ID NO: 281909 - DNA, 25 bp, probe
tcttatcccaattcaagacccttct

SEQ ID NO: 281910 - DNA, 25 bp, probe
tcttttccaaaattacttctctcta

SEQ ID NO: 281911 - DNA, 25 bp, probe
tcttttcagctatggaactattctt

SEQ ID NO: 281912 - DNA, 25 bp, probe
tcttctgtagaaaggacacaaacct

SEQ ID NO: 281913 - DNA, 25 bp, probe
tcttctgtagaaaggacacaaacct

SEQ ID NO: 281914 - DNA, 25 bp, probe
tcttctgtaattatacacatttcca

SEQ ID NO: 281915 - DNA, 25 bp, probe
tcttttcagaagataccacattcaa

SEQ ID NO: 281916 - DNA, 25 bp, probe
tcttgtttataacagtgccttaagg

SEQ ID NO: 281917 - DNA, 25 bp, probe
tcttatttcaaataggcatttcaag

SEQ ID NO: 281918 - DNA, 25 bp, probe
tctttttcaactggagctttatcat

SEQ ID NO: 281919 - DNA, 25 bp, probe
tttcctaaattgaagcttgtaaggt

SEQ ID NO: 281920 - DNA, 25 bp, probe
tctatcccaaactaagctatgtgaa

SEQ ID NO: 281921 - DNA, 25 bp, probe
tcttccccaatgagcagtgatgatg

SEQ ID NO: 281922 - DNA, 25 bp, probe
tctatccggcagtaagcgctgtctg

SEQ ID NO: 281923 - DNA, 25 bp, probe
tcttctctaggctcaggtactgctc

SEQ ID NO: 281924 - DNA, 25 bp, probe
tctttccaggcatagcagttcttta

SEQ ID NO: 281925 - DNA, 25 bp, probe
tctatgatccagccaaacgaatttc

SEQ ID NO: 281926 - DNA, 25 bp, probe
tctttcacatggaaatccaaatgtc

SEQ ID NO: 281927 - DNA, 25 bp, probe
tctatatacttacatctaaagagct

SEQ ID NO: 281928 - DNA, 25 bp, probe
tcttgtggcttagttgtagaagcag

SEQ ID NO: 281929 - DNA, 25 bp, probe
tctttcgctggcgtctacagcaacg

SEQ ID NO: 281930 - DNA, 25 bp, probe
tctttcctgaggatccatcatatag

SEQ ID NO: 281931 - DNA, 25 bp, probe
tctttgcctggggacccttaaatat

SEQ ID NO: 281932 - DNA, 25 bp, probe
tctttcctggagtccacgtttaact

SEQ ID NO: 281933 - DNA, 25 bp, probe
tctttcctgtagtcccattgatgta

SEQ ID NO: 281934 - DNA, 25 bp, probe
tcttatactgtcatcctggtgatgc

SEQ ID NO: 281935 - DNA, 25 bp, probe
tcttgacacttagccgctgtctcgc

SEQ ID NO: 281936 - DNA, 25 bp, probe
tcttacactggatcaccaactacag

SEQ ID NO: 281937 - DNA, 25 bp, probe
tcttaagggacaccctaataaagca

SEQ ID NO: 281938 - DNA, 25 bp, probe
tctttagacgacctcttccaaaaga

SEQ ID NO: 281939 - DNA, 25 bp, probe
tcttgtaactttcttcaaaaagcat

SEQ ID NO: 281940 - DNA, 25 bp, probe
tctttcacactttattcctaaaacg

SEQ ID NO: 281941 - DNA, 25 bp, probe
tcatttccacttgctttcctaatga

SEQ ID NO: 281942 - DNA, 25 bp, probe
tcttttacatggcttctttaatgaa

SEQ ID NO: 281943 - DNA, 25 bp, probe
ttgccttgaatggaacctactaaaa

SEQ ID NO: 281944 - DNA, 25 bp, probe
ttgccttgaatggaacctactaaaa

SEQ ID NO: 281945 - DNA, 25 bp, probe
tcaggccagaatggtacctttaaaa

SEQ ID NO: 281946 - DNA, 25 bp, probe
tcaggccgtaggttcctcaaggaat

SEQ ID NO: 281947 - DNA, 25 bp, probe
tcaggctcccagggtttaatgtgga

SEQ ID NO: 281948 - DNA, 25 bp, probe
tcaggcccacaggtttaaggctgag

SEQ ID NO: 281949 - DNA, 25 bp, probe
ttgtggcccgaaatcgtagtgcttg

SEQ ID NO: 281950 - DNA, 25 bp, probe
taaggcctggaaacgattttctgta

SEQ ID NO: 281951 - DNA, 25 bp, probe
tcagtggcctgtgaactgtcttcct

SEQ ID NO: 281952 - DNA, 25 bp, probe
tctatagcgtcgaaacgttcctcct

SEQ ID NO: 281953 - DNA, 25 bp, probe
tctatgacctcaaagagctgttcag

SEQ ID NO: 281954 - DNA, 25 bp, probe
tcattgactccaaaggttacggagt

SEQ ID NO: 281955 - DNA, 25 bp, probe
tcatctcctcaacatggaaactaag

SEQ ID NO: 281956 - DNA, 25 bp, probe
tcaggagctcaacatggaacagaaa

SEQ ID NO: 281957 - DNA, 25 bp, probe
tcagtcaccagctctggaattagat

SEQ ID NO: 281958 - DNA, 25 bp, probe
tcatgtaaatgctcaaagatgtaat

SEQ ID NO: 281959 - DNA, 25 bp, probe
tcttgaatgtcactcgagagataga

SEQ ID NO: 281960 - DNA, 25 bp, probe
tcttgcaagctaatgctcagcagga

SEQ ID NO: 281961 - DNA, 25 bp, probe
tcttctatgtcacctccagtgacta

SEQ ID NO: 281962 - DNA, 25 bp, probe
tcttctttgcatcctaaggacgaaa

SEQ ID NO: 281963 - DNA, 25 bp, probe
tcttccattaccaagaggacagcaa

SEQ ID NO: 281964 - DNA, 25 bp, probe
tcttccttaccaagtgaactccatg

SEQ ID NO: 281965 - DNA, 25 bp, probe
tcttccttgactcttaacatgccac

SEQ ID NO: 281966 - DNA, 25 bp, probe
tcttcaccaactgtcagaaggcaac

SEQ ID NO: 281967 - DNA, 25 bp, probe
tcttgcttctcattttgctaaggaa

SEQ ID NO: 281968 - DNA, 25 bp, probe
tctatttcctttccatgaagataat

SEQ ID NO: 281969 - DNA, 25 bp, probe
tcttctccctgtgccagaagatcga

SEQ ID NO: 281970 - DNA, 25 bp, probe
tcttctccttatgccaggatgccga

SEQ ID NO: 281971 - DNA, 25 bp, probe
tcttcgcagctttacagggtcacta

SEQ ID NO: 281972 - DNA, 25 bp, probe
tcagagtgcagtctacaacttcacc

SEQ ID NO: 281973 - DNA, 25 bp, probe
tcagactggtggaaaactctacctc

SEQ ID NO: 281974 - DNA, 25 bp, probe
tcagactggtggaaaactctacctc

SEQ ID NO: 281975 - DNA, 25 bp, probe
tcaactgtatcggaaaaaacctgga

SEQ ID NO: 281976 - DNA, 25 bp, probe
tcatcactcgtgcccaaagaaaggg

SEQ ID NO: 281977 - DNA, 25 bp, probe
tcatacaagtaaacacagaaagtca

SEQ ID NO: 281978 - DNA, 25 bp, probe
tcaacatattcgagctcaacggttt

SEQ ID NO: 281979 - DNA, 25 bp, probe
tcttgcagaccgagtctacacaagt

SEQ ID NO: 281980 - DNA, 25 bp, probe
tcttgtgaccgtgccaagaaaacgt

SEQ ID NO: 281981 - DNA, 25 bp, probe
tcttgtcctcgagccatagtgaact

SEQ ID NO: 281982 - DNA, 25 bp, probe
tcttcaccttgacgcttatgaacct

SEQ ID NO: 281983 - DNA, 25 bp, probe
tcttcaccacttcttctgacatgtg

SEQ ID NO: 281984 - DNA, 25 bp, probe
tcttcactctttcttctttgtaaac

SEQ ID NO: 281985 - DNA, 25 bp, probe
tctttgtctcttcaccgtgttaaca

SEQ ID NO: 281986 - DNA, 25 bp, probe
tcattttcaattccaaactcttaac

SEQ ID NO: 281987 - DNA, 25 bp, probe
tcttgatactttccaaattctctga

SEQ ID NO: 281988 - DNA, 25 bp, probe
tcattacctttgaaaagcttctact

SEQ ID NO: 281989 - DNA, 25 bp, probe
tctttgccttttgaactcacttcaa

SEQ ID NO: 281990 - DNA, 25 bp, probe
tctttccatctttgtagactctttt

SEQ ID NO: 281991 - DNA, 25 bp, probe
tctttgcaatgcattgtatggcttt

SEQ ID NO: 281992 - DNA, 25 bp, probe
tctttgacatctttatctggtttgc

SEQ ID NO: 281993 - DNA, 25 bp, probe
tctattcatcttttgaatgtttagt

SEQ ID NO: 281994 - DNA, 25 bp, probe
tctatagcttttgaatgtacacagc

SEQ ID NO: 281995 - DNA, 25 bp, probe
tcaccagtttatgaatctgggcagc

SEQ ID NO: 281996 - DNA, 25 bp, probe
tcttcagttttccattctgtggcac

SEQ ID NO: 281997 - DNA, 25 bp, probe
tcttcatatgtcacctttgctacgc

SEQ ID NO: 281998 - DNA, 25 bp, probe
tctattatgttatcagtgttcactg

SEQ ID NO: 281999 - DNA, 25 bp, probe
tcataaagcatgaactcatggttca

SEQ ID NO: 282000 - DNA, 25 bp, probe
tcaaacctgaacaggctatggaact

SEQ ID NO: 282001 - DNA, 25 bp, probe
tcaaggcttggagaggtatgtgccc

SEQ ID NO: 282002 - DNA, 25 bp, probe
tcttggcagggggagaggatggccc

SEQ ID NO: 282003 - DNA, 25 bp, probe
tctttgactggtgaatgcgtacatg

SEQ ID NO: 282004 - DNA, 25 bp, probe
tctttgactgcactgagaattgcta

SEQ ID NO: 282005 - DNA, 25 bp, probe
tctttgcacagataacatgtataca

SEQ ID NO: 282006 - DNA, 25 bp, probe
tctttgcatcaaactacctgctaca

SEQ ID NO: 282007 - DNA, 25 bp, probe
tcttacaatcaacacctgtcacacc

SEQ ID NO: 282008 - DNA, 25 bp, probe
tcttacaatcaacacctgtcacacc

SEQ ID NO: 282009 - DNA, 25 bp, probe
tcttaaatatcctggctcatccacc

SEQ ID NO: 282010 - DNA, 25 bp, probe
tcttgaaaacatcgtagcgattcac

SEQ ID NO: 282011 - DNA, 25 bp, probe
tcttgaccaagcaggaagctcagac

SEQ ID NO: 282012 - DNA, 25 bp, probe
tcttattgcaagacggcttctcgca

SEQ ID NO: 282013 - DNA, 25 bp, probe
tcttattcatagtgtttcccacgtg

SEQ ID NO: 282014 - DNA, 25 bp, probe
tcttatcttaattgcgtcctacacg

SEQ ID NO: 282015 - DNA, 25 bp, probe
tcttatttcaaatgtctgctaatgc

SEQ ID NO: 282016 - DNA, 25 bp, probe
tcttcagttcaatgttcaccataga

SEQ ID NO: 282017 - DNA, 25 bp, probe
tcttcagttcaatgttcaccataga

SEQ ID NO: 282018 - DNA, 25 bp, probe
tcttacgccacatgtgtcacttcat

SEQ ID NO: 282019 - DNA, 25 bp, probe
tcttacccgcaggttttcagatcta

SEQ ID NO: 282020 - DNA, 25 bp, probe
tcttcaccttgatgtatgttctgat

SEQ ID NO: 282021 - DNA, 25 bp, probe
tcttacagtgatacagttttgtatt

SEQ ID NO: 282022 - DNA, 25 bp, probe
tcttcagcagtgatcacctgattga

SEQ ID NO: 282023 - DNA, 25 bp, probe
tcttcagcagtgatcacctgattga

SEQ ID NO: 282024 - DNA, 25 bp, probe
tcttctgctatgtgacttgcatcgt

SEQ ID NO: 282025 - DNA, 25 bp, probe
tcttctgctatgtgacttgcatcgt

SEQ ID NO: 282026 - DNA, 25 bp, probe
tcttctcatagacatgcctgcagag

SEQ ID NO: 282027 - DNA, 25 bp, probe
tctttcatatggccatgatccagga

SEQ ID NO: 282028 - DNA, 25 bp, probe
tcattcacatctagccaagccagtg

SEQ ID NO: 282029 - DNA, 25 bp, probe
tcttcattctcccaactgagtgtag

SEQ ID NO: 282030 - DNA, 25 bp, probe
tcttcattctcccaactgagtgtag

SEQ ID NO: 282031 - DNA, 25 bp, probe
tctttgtcatacctaatctgttgag

SEQ ID NO: 282032 - DNA, 25 bp, probe
tcttggatctcctcagatctttggt

SEQ ID NO: 282033 - DNA, 25 bp, probe
tcttagattctgaccatgactcata

SEQ ID NO: 282034 - DNA, 25 bp, probe
tctttgagattgacctgactgctct

SEQ ID NO: 282035 - DNA, 25 bp, probe
tcttctggacaaacttctgcgatac

SEQ ID NO: 282036 - DNA, 25 bp, probe
tcttctggacaaacttctgcgatac

SEQ ID NO: 282037 - DNA, 25 bp, probe
tcttggaaagacttctctgccatcc

SEQ ID NO: 282038 - DNA, 25 bp, probe
tcttgtgacaattgttttcctccct

SEQ ID NO: 282039 - DNA, 25 bp, probe
tttgcactggacatattccctacct

SEQ ID NO: 282040 - DNA, 25 bp, probe
tcttcaagggctaattacctaacca

SEQ ID NO: 282041 - DNA, 25 bp, probe
tctttagggtaattcctccagtgac

SEQ ID NO: 282042 - DNA, 25 bp, probe
tcttgctttggtcttcttccaatga

SEQ ID NO: 282043 - DNA, 25 bp, probe
tcttgctttggtcttcttccaatga

SEQ ID NO: 282044 - DNA, 25 bp, probe
tcttatattgccatttcttccacaa

SEQ ID NO: 282045 - DNA, 25 bp, probe
tcttatgttctcattatctctacaa

SEQ ID NO: 282046 - DNA, 25 bp, probe
tctttctgcttcagttgctgtcagg

SEQ ID NO: 282047 - DNA, 25 bp, probe
tctttatcattgtctttcttaggaa

SEQ ID NO: 282048 - DNA, 25 bp, probe
tcttttcatctggcaaccctactaa

SEQ ID NO: 282049 - DNA, 25 bp, probe
tctttgtgttctcagccctattaga

SEQ ID NO: 282050 - DNA, 25 bp, probe
tctttgtgttctcagccctattaga

SEQ ID NO: 282051 - DNA, 25 bp, probe
tcttatctgggcccaacctcaaata

SEQ ID NO: 282052 - DNA, 25 bp, probe
tcttatgctgtacccagtttctaaa

SEQ ID NO: 282053 - DNA, 25 bp, probe
tcttatgctgtacccagtttctaaa

SEQ ID NO: 282054 - DNA, 25 bp, probe
tcttctatgctctccagtaccataa

SEQ ID NO: 282055 - DNA, 25 bp, probe
tctttttcatcccagaccaatggca

SEQ ID NO: 282056 - DNA, 25 bp, probe
tcttttgatgtctgcagaagaatgt

SEQ ID NO: 282057 - DNA, 25 bp, probe
tctttctgctgccttagctaaatca

SEQ ID NO: 282058 - DNA, 25 bp, probe
tctttctgctgccttagctaaatca

SEQ ID NO: 282059 - DNA, 25 bp, probe
tctttctgtgttacagttggacact

SEQ ID NO: 282060 - DNA, 25 bp, probe
tctttctgtgtgtgcctcacgaaat

SEQ ID NO: 282061 - DNA, 25 bp, probe
tcttcctctatttggctcacaaaca

SEQ ID NO: 282062 - DNA, 25 bp, probe
tcattcccaaatcttctagaagcat

SEQ ID NO: 282063 - DNA, 25 bp, probe
tcttcccacgagtcttcacatgaag

SEQ ID NO: 282064 - DNA, 25 bp, probe
tcttcccacgagtcttcacatgaag

SEQ ID NO: 282065 - DNA, 25 bp, probe
tcttccatacgattgttatagagaa

SEQ ID NO: 282066 - DNA, 25 bp, probe
tcttcctcctgcctcttatggaaga

SEQ ID NO: 282067 - DNA, 25 bp, probe
tctttcagcctccatcttattaaat

SEQ ID NO: 282068 - DNA, 25 bp, probe
tctttagccatacatatcattgcat

SEQ ID NO: 282069 - DNA, 25 bp, probe
tctttgagcgagcccattttgtgga

SEQ ID NO: 282070 - DNA, 25 bp, probe
tcttattggcagtcacatttatgga

SEQ ID NO: 282071 - DNA, 25 bp, probe
tctttgagagcagtgcacattttgc

SEQ ID NO: 282072 - DNA, 25 bp, probe
tcttctgcatgaacccatatatgag

SEQ ID NO: 282073 - DNA, 25 bp, probe
tcttgctctgacaccttcagcaatg

SEQ ID NO: 282074 - DNA, 25 bp, probe
tcaggcctgatctccgtggaagaat

SEQ ID NO: 282075 - DNA, 25 bp, probe
tcatagcactggtcactgcaatcca

SEQ ID NO: 282076 - DNA, 25 bp, probe
tcttgcagtgttaccactccacgat

SEQ ID NO: 282077 - DNA, 25 bp, probe
tcttgcagtgttaccactccacgat

SEQ ID NO: 282078 - DNA, 25 bp, probe
tcttcagggtcaacatgtccaacca

SEQ ID NO: 282079 - DNA, 25 bp, probe
tcttctggccacagattatcaagga

SEQ ID NO: 282080 - DNA, 25 bp, probe
tcttattggaattgcttatgaagga

SEQ ID NO: 282081 - DNA, 25 bp, probe
tctttctgggacttggagagtggat

SEQ ID NO: 282082 - DNA, 25 bp, probe
tcttccaggcgctacagcaggagtg

SEQ ID NO: 282083 - DNA, 25 bp, probe
tcttccatcaactcatggcaggggt

SEQ ID NO: 282084 - DNA, 25 bp, probe
tcttggcaaatctgctagggatctt

SEQ ID NO: 282085 - DNA, 25 bp, probe
tcttgtgaaatgctctcggctatgt

SEQ ID NO: 282086 - DNA, 25 bp, probe
tcatcatggaaacctcagttttgtt

SEQ ID NO: 282087 - DNA, 25 bp, probe
tcttggaatatgcccgttggtctat

SEQ ID NO: 282088 - DNA, 25 bp, probe
tcattccaatgtcccgggagtttac

SEQ ID NO: 282089 - DNA, 25 bp, probe
tcttccaattcgtcagtgagagctg

SEQ ID NO: 282090 - DNA, 25 bp, probe
tcattccgattcagcaggaggcctg

SEQ ID NO: 282091 - DNA, 25 bp, probe
tcattactaatgaccaggaggctga

SEQ ID NO: 282092 - DNA, 25 bp, probe
tcttcaatgaagacactggagggaa

SEQ ID NO: 282093 - DNA, 25 bp, probe
tcttcaggtagcctcatggcagcgg

SEQ ID NO: 282094 - DNA, 25 bp, probe
tcttcaggatgattcatctagcaga

SEQ ID NO: 282095 - DNA, 25 bp, probe
tcttcatggaattcacaaagtaatt

SEQ ID NO: 282096 - DNA, 25 bp, probe
tcttcaattcattacaaggcttatt

SEQ ID NO: 282097 - DNA, 25 bp, probe
tcttcctatcaatccatcttatttg

SEQ ID NO: 282098 - DNA, 25 bp, probe
tcttcaagatgcaatacttttctta

SEQ ID NO: 282099 - DNA, 25 bp, probe
tcttccagctgttttgtaatttcag

SEQ ID NO: 282100 - DNA, 25 bp, probe
tcatagccagttttccttttgaagt

SEQ ID NO: 282101 - DNA, 25 bp, probe
tcatcagccggattttgttattgat

SEQ ID NO: 282102 - DNA, 25 bp, probe
tcatcacgccggtgagcacctagaa

SEQ ID NO: 282103 - DNA, 25 bp, probe
tcatccaccaggggatgaaatgtga

SEQ ID NO: 282104 - DNA, 25 bp, probe
tcttcagccatgattagacgttgac

SEQ ID NO: 282105 - DNA, 25 bp, probe
tcttctcttgctgtaacacttgacc

SEQ ID NO: 282106 - DNA, 25 bp, probe
tcatttcatttaagagatcatttca

SEQ ID NO: 282107 - DNA, 25 bp, probe
tctttcacttattcagaacattaca

SEQ ID NO: 282108 - DNA, 25 bp, probe
tctttcacttattcagaacattaca

SEQ ID NO: 282109 - DNA, 25 bp, probe
tctttacactatccctaattacatg

SEQ ID NO: 282110 - DNA, 25 bp, probe
tctttacactatccctaattacatg

SEQ ID NO: 282111 - DNA, 25 bp, probe
tctttatagccatcctgagcttcct

SEQ ID NO: 282112 - DNA, 25 bp, probe
tctttatgagcctcgatgttccctg

SEQ ID NO: 282113 - DNA, 25 bp, probe
tctttatgagcctcgatgttccctg

SEQ ID NO: 282114 - DNA, 25 bp, probe
tcagcgtcgacctcatgagttacct

SEQ ID NO: 282115 - DNA, 25 bp, probe
tcagcgtcgacctcatgagttacct

SEQ ID NO: 282116 - DNA, 25 bp, probe
tcaggctgtactttcaggttccaaa

SEQ ID NO: 282117 - DNA, 25 bp, probe
tcttgctgtaactcagacattccaa

SEQ ID NO: 282118 - DNA, 25 bp, probe
tcttctaaacttggcagtttctaac

SEQ ID NO: 282119 - DNA, 25 bp, probe
tctttcaatactatcttttctccca

SEQ ID NO: 282120 - DNA, 25 bp, probe
tctttcaatactatcttttctccca

SEQ ID NO: 282121 - DNA, 25 bp, probe
tcttgtcataacagttttgtgttcc

SEQ ID NO: 282122 - DNA, 25 bp, probe
tcttgtctgcaagaattttctgata

SEQ ID NO: 282123 - DNA, 25 bp, probe
tctttctgtgatgccttattcttca

SEQ ID NO: 282124 - DNA, 25 bp, probe
tctttatggtgggctgtgactcttc

SEQ ID NO: 282125 - DNA, 25 bp, probe
tctttcagcgcagcttgtgagactg

SEQ ID NO: 282126 - DNA, 25 bp, probe
tctttcagcagcaacctgagaactg

SEQ ID NO: 282127 - DNA, 25 bp, probe
tcttctatgctatcactgcaaaggg

SEQ ID NO: 282128 - DNA, 25 bp, probe
tcttccatgtcagagtcacctgatg

SEQ ID NO: 282129 - DNA, 25 bp, probe
tcttcctgttaaaaccatgagaatt

SEQ ID NO: 282130 - DNA, 25 bp, probe
tcttccgactacaacctcatggatg

SEQ ID NO: 282131 - DNA, 25 bp, probe
tcttccggcaaaacgatgggcagtt

SEQ ID NO: 282132 - DNA, 25 bp, probe
tcttccgccagaacctgagggtggt

SEQ ID NO: 282133 - DNA, 25 bp, probe
tcttcggccagcacggagagcgtga

SEQ ID NO: 282134 - DNA, 25 bp, probe
tcttctgcgtccacggagatgggca

SEQ ID NO: 282135 - DNA, 25 bp, probe
tcttctgcgtccacggagatgggca

SEQ ID NO: 282136 - DNA, 25 bp, probe
tcttctgcgtccacggagatgggca

SEQ ID NO: 282137 - DNA, 25 bp, probe
tctttcttccatggggcgtggcaag

SEQ ID NO: 282138 - DNA, 25 bp, probe
tctttcccgatctgggctggagagc

SEQ ID NO: 282139 - DNA, 25 bp, probe
tcatcattcgggtccgggctggaga

SEQ ID NO: 282140 - DNA, 25 bp, probe
tcatcattcgggtccgggctggaga

SEQ ID NO: 282141 - DNA, 25 bp, probe
tcatttagaaatcggaggtgtggat

SEQ ID NO: 282142 - DNA, 25 bp, probe
tcatccttgcaggtgggggttgctg

SEQ ID NO: 282143 - DNA, 25 bp, probe
tcttttgcgacatgacggtgatgct

SEQ ID NO: 282144 - DNA, 25 bp, probe
tctttctgctggtgaacgtgctgtg

SEQ ID NO: 282145 - DNA, 25 bp, probe
tctttcattgtggctgagaccgtgg

SEQ ID NO: 282146 - DNA, 25 bp, probe
tcttctcactgggctacatgcccta

SEQ ID NO: 282147 - DNA, 25 bp, probe
tcttgcttttggtacatgccctgaa

SEQ ID NO: 282148 - DNA, 25 bp, probe
tcttgcttttggcgcccacagtgat

SEQ ID NO: 282149 - DNA, 25 bp, probe
tctttctttgtagtgtcccagctaa

SEQ ID NO: 282150 - DNA, 25 bp, probe
tctttctttgtagtgtcccagctaa

SEQ ID NO: 282151 - DNA, 25 bp, probe
tcttggctttggggatacttctaaa

SEQ ID NO: 282152 - DNA, 25 bp, probe
tcttgggcatttgggtagttctcac

SEQ ID NO: 282153 - DNA, 25 bp, probe
tctttatacttttctcagttctact

SEQ ID NO: 282154 - DNA, 25 bp, probe
tcttttacaattgcctgggctcctt

SEQ ID NO: 282155 - DNA, 25 bp, probe
tcttttacaattgcctgggctcctt

SEQ ID NO: 282156 - DNA, 25 bp, probe
tcttcatataaactcaagtgcctgc

SEQ ID NO: 282157 - DNA, 25 bp, probe
tcttttcagtagtgagcagcatcta

SEQ ID NO: 282158 - DNA, 25 bp, probe
tcttcttgcagagcaagggcatcat

SEQ ID NO: 282159 - DNA, 25 bp, probe
tcttctgtgtggacgaggggaggct

SEQ ID NO: 282160 - DNA, 25 bp, probe
tcttcgtgctagtcggggtggagca

SEQ ID NO: 282161 - DNA, 25 bp, probe
tcttcgtgctgatggagcgttacca

SEQ ID NO: 282162 - DNA, 25 bp, probe
tcttcagctgtgtgtgggcaatccc

SEQ ID NO: 282163 - DNA, 25 bp, probe
tcatttgggtagttggattccacat

SEQ ID NO: 282164 - DNA, 25 bp, probe
tcatgtatgggaagcctaagtctaa

SEQ ID NO: 282165 - DNA, 25 bp, probe
tcataagaagaactttttgcataga

SEQ ID NO: 282166 - DNA, 25 bp, probe
taagcaaataaaggtggccatcaag

SEQ ID NO: 282167 - DNA, 25 bp, probe
taaggaggtcatgggggccttgagg

SEQ ID NO: 282168 - DNA, 25 bp, probe
tcagagtaggtggcgacgtccctga

SEQ ID NO: 282169 - DNA, 25 bp, probe
tcaaaagggcaagtgcctctccagt

SEQ ID NO: 282170 - DNA, 25 bp, probe
tcaggaggggaagtccagcctacca

SEQ ID NO: 282171 - DNA, 25 bp, probe
tcagaggggcgattccctcgtcaat

SEQ ID NO: 282172 - DNA, 25 bp, probe
tcaggggacgattctgtgttttctc

SEQ ID NO: 282173 - DNA, 25 bp, probe
tcatcagggacccattgttctcttc

SEQ ID NO: 282174 - DNA, 25 bp, probe
tcatcagggacccattgttctcttc

SEQ ID NO: 282175 - DNA, 25 bp, probe
tcatcaaaggcggtcttggccctgc

SEQ ID NO: 282176 - DNA, 25 bp, probe
tcttacgtgcgcctttctgccggac

SEQ ID NO: 282177 - DNA, 25 bp, probe
tcttgaaggtgtgttctccaggaca

SEQ ID NO: 282178 - DNA, 25 bp, probe
tctttaggtctgaactggctgagaa

SEQ ID NO: 282179 - DNA, 25 bp, probe
tctttttcttaatgcgctcaaacag

SEQ ID NO: 282180 - DNA, 25 bp, probe
tcttttatctgttcctccaacaaca

SEQ ID NO: 282181 - DNA, 25 bp, probe
tcttacatgttttcctctcgaaagc

SEQ ID NO: 282182 - DNA, 25 bp, probe
tcttgagcatttaatcctagtaaca

SEQ ID NO: 282183 - DNA, 25 bp, probe
tcttgagacttattcgctactacga

SEQ ID NO: 282184 - DNA, 25 bp, probe
tcttggagcgtctgcagtactgcac

SEQ ID NO: 282185 - DNA, 25 bp, probe
tcattgggccctgggtgatggctct

SEQ ID NO: 282186 - DNA, 25 bp, probe
tcattgtggccctgaaggttctctt

SEQ ID NO: 282187 - DNA, 25 bp, probe
tcatattgtattttaactgtttctc

SEQ ID NO: 282188 - DNA, 25 bp, probe
tcttcttcatgttcattgggtttat

SEQ ID NO: 282189 - DNA, 25 bp, probe
tcatacttcattttgtggttgtctt

SEQ ID NO: 282190 - DNA, 25 bp, probe
tcttcttgccaattttgttgtttaa

SEQ ID NO: 282191 - DNA, 25 bp, probe
tcttcccagcaggtttttgccttag

SEQ ID NO: 282192 - DNA, 25 bp, probe
tcattcaaatgctcttttccctata

SEQ ID NO: 282193 - DNA, 25 bp, probe
tcataaagagcacgttttccattat

SEQ ID NO: 282194 - DNA, 25 bp, probe
tcaccagggctgcttttaactctgg

SEQ ID NO: 282195 - DNA, 25 bp, probe
tcagcctttaggtctttagtccggg

SEQ ID NO: 282196 - DNA, 25 bp, probe
tcagcctttttgatttaaccaccct

SEQ ID NO: 282197 - DNA, 25 bp, probe
tcagaagttttcctttacaccaact

SEQ ID NO: 282198 - DNA, 25 bp, probe
tcagagcagttgggttttacccctt

SEQ ID NO: 282199 - DNA, 25 bp, probe
tcatcacagtttgagtttgacccca

SEQ ID NO: 282200 - DNA, 25 bp, probe
tactaacaaccaatttgtccccaca

SEQ ID NO: 282201 - DNA, 25 bp, probe
tcaccaaaaactatttcttcagccc

SEQ ID NO: 282202 - DNA, 25 bp, probe
tcaggccaaagaatccttctcttcc

SEQ ID NO: 282203 - DNA, 25 bp, probe
tcagtggtcaaaatactctgtttag

SEQ ID NO: 282204 - DNA, 25 bp, probe
tcagaagctcaaacttcctggtaac

SEQ ID NO: 282205 - DNA, 25 bp, probe
tcatagtgtcagtccttcagctggc

SEQ ID NO: 282206 - DNA, 25 bp, probe
tcttgtgtcagaagtctagcctcag

SEQ ID NO: 282207 - DNA, 25 bp, probe
tcttgtgctcagacatccttggatc

SEQ ID NO: 282208 - DNA, 25 bp, probe
tcttgctgtaacacttgaccttaac

SEQ ID NO: 282209 - DNA, 25 bp, probe
tcttggtacagctgcctgactctaa

SEQ ID NO: 282210 - DNA, 25 bp, probe
tcttggtcaatcttgactagattaa

SEQ ID NO: 282211 - DNA, 25 bp, probe
tcttgatgccaatcttcacagcatt

SEQ ID NO: 282212 - DNA, 25 bp, probe
tcttacctatgatttcatccatgtc

SEQ ID NO: 282213 - DNA, 25 bp, probe
tcttgacaatgactattccctgaca

SEQ ID NO: 282214 - DNA, 25 bp, probe
tcttccacagagacatctccctgtg

SEQ ID NO: 282215 - DNA, 25 bp, probe
tcttcaatcgcagagctctggatcc

SEQ ID NO: 282216 - DNA, 25 bp, probe
tcttcatcacaactagatttgcctc

SEQ ID NO: 282217 - DNA, 25 bp, probe
tcttggcacaatgagtgtctctgct

SEQ ID NO: 282218 - DNA, 25 bp, probe
tcttatcagcaagatggtcccataa

SEQ ID NO: 282219 - DNA, 25 bp, probe
tcttatcagcaagatggtcccataa

SEQ ID NO: 282220 - DNA, 25 bp, probe
tcttcatcatgaacttggaccaaaa

SEQ ID NO: 282221 - DNA, 25 bp, probe
tcttcatcatgaacttggaccaaaa

SEQ ID NO: 282222 - DNA, 25 bp, probe
tcttatcttccaagtggccaacacc

SEQ ID NO: 282223 - DNA, 25 bp, probe
tcttactcacagagctggtcaccaa

SEQ ID NO: 282224 - DNA, 25 bp, probe
tcttgctgccggagcgttacatcaa

SEQ ID NO: 282225 - DNA, 25 bp, probe
tcttggccatggagcgtggtagcca

SEQ ID NO: 282226 - DNA, 25 bp, probe
tcatttaaggaggcgctggcaagcc

SEQ ID NO: 282227 - DNA, 25 bp, probe
tcatgatctatacgcaaccggaacc

SEQ ID NO: 282228 - DNA, 25 bp, probe
tcatgatctatacgcaaccggaacc

SEQ ID NO: 282229 - DNA, 25 bp, probe
tcatcatgctgatctgcaatgcaaa

SEQ ID NO: 282230 - DNA, 25 bp, probe
tcattgtacctcaagccagacattt

SEQ ID NO: 282231 - DNA, 25 bp, probe
tcttgatgaccagtatgtcagttca

SEQ ID NO: 282232 - DNA, 25 bp, probe
tcttccactgcaggttcattgcaga

SEQ ID NO: 282233 - DNA, 25 bp, probe
tcttctactgcttcttcaatggaga

SEQ ID NO: 282234 - DNA, 25 bp, probe
tcttcgttgcattgcctgagaggag

SEQ ID NO: 282235 - DNA, 25 bp, probe
tcttcttgtgcttctccataatgat

SEQ ID NO: 282236 - DNA, 25 bp, probe
tcttgctctgtttgagtcaacattt

SEQ ID NO: 282237 - DNA, 25 bp, probe
tcttgctctgtttgagtcaacattt

SEQ ID NO: 282238 - DNA, 25 bp, probe
tcttgcatggtttggagctgatcgc

SEQ ID NO: 282239 - DNA, 25 bp, probe
tcttgcgcatctttaagctgacccg

SEQ ID NO: 282240 - DNA, 25 bp, probe
tcttgcgcatctttaagctgacccg

SEQ ID NO: 282241 - DNA, 25 bp, probe
tcttcgtctttgagcagcagtgcca

SEQ ID NO: 282242 - DNA, 25 bp, probe
tcttctgttttgaagctcatgggaa

SEQ ID NO: 282243 - DNA, 25 bp, probe
tcttcgatacttacacaaggagaag

SEQ ID NO: 282244 - DNA, 25 bp, probe
tttgtgtactggccaagtcgagaag

SEQ ID NO: 282245 - DNA, 25 bp, probe
tcattgtggcctgggccattgggaa

SEQ ID NO: 282246 - DNA, 25 bp, probe
tcatacagatcctgcagctcatggc

SEQ ID NO: 282247 - DNA, 25 bp, probe
tcatgaaccagctcagccacgtaaa

SEQ ID NO: 282248 - DNA, 25 bp, probe
tcatgaaccagctcagccacgtaaa

SEQ ID NO: 282249 - DNA, 25 bp, probe
tcatgaaccaaaggacacgggccaa

SEQ ID NO: 282250 - DNA, 25 bp, probe
tcatgaaccaaaggacacgggccaa

SEQ ID NO: 282251 - DNA, 25 bp, probe
tcatttcctaagctacatatggcca

SEQ ID NO: 282252 - DNA, 25 bp, probe
tcttttctcagtggataatacaaca

SEQ ID NO: 282253 - DNA, 25 bp, probe
tttgttccttaaagcaataactgac

SEQ ID NO: 282254 - DNA, 25 bp, probe
tcttgtatcctttgaggagacgtta

SEQ ID NO: 282255 - DNA, 25 bp, probe
tcttgtgatcacttagcgaaccctt

SEQ ID NO: 282256 - DNA, 25 bp, probe
tcttggtgacagtggaatctttgtc

SEQ ID NO: 282257 - DNA, 25 bp, probe
tcttcctggatctgagaatttattg

SEQ ID NO: 282258 - DNA, 25 bp, probe
tcttccttcatctcactttaatgct

SEQ ID NO: 282259 - DNA, 25 bp, probe
tcttcacctgtcttaagattaaata

SEQ ID NO: 282260 - DNA, 25 bp, probe
tcttaccagtgctggtttaaacatt

SEQ ID NO: 282261 - DNA, 25 bp, probe
tcttcgccatgggggtctttgaaca

SEQ ID NO: 282262 - DNA, 25 bp, probe
tcttcgccatgggggtctttgaaca

SEQ ID NO: 282263 - DNA, 25 bp, probe
tcattcgctcccgggggaagtcaca

SEQ ID NO: 282264 - DNA, 25 bp, probe
tcttcagcatccgacgggaacatct

SEQ ID NO: 282265 - DNA, 25 bp, probe
tcttgaatccctgtggaaatctaca

SEQ ID NO: 282266 - DNA, 25 bp, probe
tatcgaatccctgccgttagcgact

SEQ ID NO: 282267 - DNA, 25 bp, probe
tcataaaccctggcactggtcacaa

SEQ ID NO: 282268 - DNA, 25 bp, probe
tcataaaactacttgtcagcatcac

SEQ ID NO: 282269 - DNA, 25 bp, probe
tcttaacaccacctgatcagctggt

SEQ ID NO: 282270 - DNA, 25 bp, probe
tcttattcactgagtctcatggaga

SEQ ID NO: 282271 - DNA, 25 bp, probe
tcttcactcctgggtctatgatggt

SEQ ID NO: 282272 - DNA, 25 bp, probe
tcttctgctactggcgttttgtgtg

SEQ ID NO: 282273 - DNA, 25 bp, probe
tcttcgatctctgggatttatgctc

SEQ ID NO: 282274 - DNA, 25 bp, probe
tcttcgatctctgggatttatgctc

SEQ ID NO: 282275 - DNA, 25 bp, probe
tcttcttctcataggtgtccagcat

SEQ ID NO: 282276 - DNA, 25 bp, probe
tcttctggctgcaaaggtctgagtt

SEQ ID NO: 282277 - DNA, 25 bp, probe
tcatttgccatgaagaggggtgtct

SEQ ID NO: 282278 - DNA, 25 bp, probe
tcttacatcatgagtggactttgca

SEQ ID NO: 282279 - DNA, 25 bp, probe
tcttacatcagatgtttctttgcag

SEQ ID NO: 282280 - DNA, 25 bp, probe
tcttaagcacaaatttcatttccat

SEQ ID NO: 282281 - DNA, 25 bp, probe
tcttgcaaaatatgttatgtctcca

SEQ ID NO: 282282 - DNA, 25 bp, probe
tcttgacaaaacctaacttgcgcag

SEQ ID NO: 282283 - DNA, 25 bp, probe
tcttgacaaaacctaacttgcgcag

SEQ ID NO: 282284 - DNA, 25 bp, probe
tcttcacaaattgcaaatccgctag

SEQ ID NO: 282285 - DNA, 25 bp, probe
tcttcacacctgttctgaatccagc

SEQ ID NO: 282286 - DNA, 25 bp, probe
tcttcaccctgatcataatttcttc

SEQ ID NO: 282287 - DNA, 25 bp, probe
tcttactgccgattgcttattactt

SEQ ID NO: 282288 - DNA, 25 bp, probe
tcattgattgcctcctgtaatcctg

SEQ ID NO: 282289 - DNA, 25 bp, probe
tcattcttccaagctgagagtctag

SEQ ID NO: 282290 - DNA, 25 bp, probe
tcattcttccaagctgagagtctag

SEQ ID NO: 282291 - DNA, 25 bp, probe
tcatcttcctcaacctggtgattac

SEQ ID NO: 282292 - DNA, 25 bp, probe
tcttcatcctgaaccggaatgacca

SEQ ID NO: 282293 - DNA, 25 bp, probe
tcttcatccagatgccaaatatgcc

SEQ ID NO: 282294 - DNA, 25 bp, probe
tcttgacctgcttctgaaagtgcca

SEQ ID NO: 282295 - DNA, 25 bp, probe
tcttcagcctgtctgtgattgctgc

SEQ ID NO: 282296 - DNA, 25 bp, probe
tcttcagcctgtctgtgattgctgc

SEQ ID NO: 282297 - DNA, 25 bp, probe
tcttgcagccgtgtggacgaagttt

SEQ ID NO: 282298 - DNA, 25 bp, probe
tcttaggcgcttcaggcggagttgg

SEQ ID NO: 282299 - DNA, 25 bp, probe
tcattcgggtccgggctggagaacg

SEQ ID NO: 282300 - DNA, 25 bp, probe
tcattcgggtccgggctggagaacg

SEQ ID NO: 282301 - DNA, 25 bp, probe
tcttcctggctgccatggcgtatga

SEQ ID NO: 282302 - DNA, 25 bp, probe
tcttcctggctgccatggcgtatga

SEQ ID NO: 282303 - DNA, 25 bp, probe
tcttcagctactggtggcggaggaa

SEQ ID NO: 282304 - DNA, 25 bp, probe
tcttcacgcatctgggagcgagagg

SEQ ID NO: 282305 - DNA, 25 bp, probe
tcttcctaaaggtcatgcagctggt

SEQ ID NO: 282306 - DNA, 25 bp, probe
tcttcttgcaaagcacaagctggga

SEQ ID NO: 282307 - DNA, 25 bp, probe
tcttcggcagaagcacttgtcagag

SEQ ID NO: 282308 - DNA, 25 bp, probe
tcttcgaaatcagagccttaggact

SEQ ID NO: 282309 - DNA, 25 bp, probe
tcttcgaaatcaggtggttagctca

SEQ ID NO: 282310 - DNA, 25 bp, probe
tcttctggaagctggagctaatgtt

SEQ ID NO: 282311 - DNA, 25 bp, probe
tcttctgagagctcctgaggaatgt

SEQ ID NO: 282312 - DNA, 25 bp, probe
tcttcatgggctcctttaggcagtg

SEQ ID NO: 282313 - DNA, 25 bp, probe
tcttctgggtcctgccagagggcag

SEQ ID NO: 282314 - DNA, 25 bp, probe
tcttctgggtcctgccagagggcag

SEQ ID NO: 282315 - DNA, 25 bp, probe
tcttcaaggtgcgctccaaggagga

SEQ ID NO: 282316 - DNA, 25 bp, probe
tttgcacatttgggcgctaaaggga

SEQ ID NO: 282317 - DNA, 25 bp, probe
tcttccatggggcgtggcaagggaa

SEQ ID NO: 282318 - DNA, 25 bp, probe
taatgcgggggctggaccaggctga

SEQ ID NO: 282319 - DNA, 25 bp, probe
ttagggctcgtggggaagcggctga

SEQ ID NO: 282320 - DNA, 25 bp, probe
ttagggctcgtggggaagcggctga

SEQ ID NO: 282321 - DNA, 25 bp, probe
taagatgtgccctggtaactggctt

SEQ ID NO: 282322 - DNA, 25 bp, probe
taaagacggattctaaggactctaa

SEQ ID NO: 282323 - DNA, 25 bp, probe
tcaaaatgccggtacttaggaccta

SEQ ID NO: 282324 - DNA, 25 bp, probe
tcaataaacaagatcgtcaggacca

SEQ ID NO: 282325 - DNA, 25 bp, probe
tcagaagacacctaccgattggccc

SEQ ID NO: 282326 - DNA, 25 bp, probe
tcagaaaatccttgctcgttccgca

SEQ ID NO: 282327 - DNA, 25 bp, probe
tcattcaaatccagtttctcaggtg

SEQ ID NO: 282328 - DNA, 25 bp, probe
tcattcaaatccagtttctcaggtg

SEQ ID NO: 282329 - DNA, 25 bp, probe
tcttcataataccagtgtgatgtca

SEQ ID NO: 282330 - DNA, 25 bp, probe
tcttcaacatccaagcatgtggcca

SEQ ID NO: 282331 - DNA, 25 bp, probe
tcttcatcacgcttagcatcgtgct

SEQ ID NO: 282332 - DNA, 25 bp, probe
tcttctgcagactcatgcagcccta

SEQ ID NO: 282333 - DNA, 25 bp, probe
tcttctcaaatggctgacttctggt

SEQ ID NO: 282334 - DNA, 25 bp, probe
tcattctcaaatgcggcttcgcttt

SEQ ID NO: 282335 - DNA, 25 bp, probe
tcattctcaaatgcggcttcgcttt

SEQ ID NO: 282336 - DNA, 25 bp, probe
tcttctgcacgagcaagtttctcat

SEQ ID NO: 282337 - DNA, 25 bp, probe
tcttcgcttgtttatttattcattt

SEQ ID NO: 282338 - DNA, 25 bp, probe
tcttcctctatttcctggagtcatg

SEQ ID NO: 282339 - DNA, 25 bp, probe
tcttctgtctattattctggagtat

SEQ ID NO: 282340 - DNA, 25 bp, probe
tcttctgagcaatattctagatgtc

SEQ ID NO: 282341 - DNA, 25 bp, probe
tcttcttcagatctttcagtgtcat

SEQ ID NO: 282342 - DNA, 25 bp, probe
tcatacctagtctttctatgctcca

SEQ ID NO: 282343 - DNA, 25 bp, probe
tcatacctgtccttttgatgttagt

SEQ ID NO: 282344 - DNA, 25 bp, probe
tcatttctccacttgccagtttaat

SEQ ID NO: 282345 - DNA, 25 bp, probe
tcatctttccactaacgtactatca

SEQ ID NO: 282346 - DNA, 25 bp, probe
tcattgtctacacaccctaactaaa

SEQ ID NO: 282347 - DNA, 25 bp, probe
tcattggaatcaccacccattccat

SEQ ID NO: 282348 - DNA, 25 bp, probe
tcattcaagacacaaccatctcctt

SEQ ID NO: 282349 - DNA, 25 bp, probe
tcttcaatgactcaacacgcctcat

SEQ ID NO: 282350 - DNA, 25 bp, probe
tcttctggatcaaaacactcctgat

SEQ ID NO: 282351 - DNA, 25 bp, probe
tcatatgcagcgacaaagaaaactt

SEQ ID NO: 282352 - DNA, 25 bp, probe
tcaaaggtcttccaaaactcaacag

SEQ ID NO: 282353 - DNA, 25 bp, probe
taaattagctgtcaaacctcctaac

SEQ ID NO: 282354 - DNA, 25 bp, probe
tacaaatccttgtaaataccccaca

SEQ ID NO: 282355 - DNA, 25 bp, probe
tacaaatccttgtaaataccccaca

SEQ ID NO: 282356 - DNA, 25 bp, probe
tacaaatccttgtaaataccccaca

SEQ ID NO: 282357 - DNA, 25 bp, probe
tcaagaaacgtgtgaaaactcccta

SEQ ID NO: 282358 - DNA, 25 bp, probe
taatgaaacgctgttcagaaaccag

SEQ ID NO: 282359 - DNA, 25 bp, probe
tcataccaacgtgttttatcccgcc

SEQ ID NO: 282360 - DNA, 25 bp, probe
tcataccaacgtgttttatcccgcc

SEQ ID NO: 282361 - DNA, 25 bp, probe
tcatcacctacgtttatttagctct

SEQ ID NO: 282362 - DNA, 25 bp, probe
tcatacctaacgtctcacttggctg

SEQ ID NO: 282363 - DNA, 25 bp, probe
tcataccaaagtttagaggctctgg

SEQ ID NO: 282364 - DNA, 25 bp, probe
tcataccagaatgcttagactcttt

SEQ ID NO: 282365 - DNA, 25 bp, probe
tcatgtccaaggattggccgcttgt

SEQ ID NO: 282366 - DNA, 25 bp, probe
tcttcctggcagatttgggcatgtg

SEQ ID NO: 282367 - DNA, 25 bp, probe
tcttcattggccacttgtgcctggc

SEQ ID NO: 282368 - DNA, 25 bp, probe
tcttgcatgattcttcttggtctac

SEQ ID NO: 282369 - DNA, 25 bp, probe
tcattgggtgttttgtggccatcac

SEQ ID NO: 282370 - DNA, 25 bp, probe
tcttgctgttctgattgacccatac

SEQ ID NO: 282371 - DNA, 25 bp, probe
tcttgctgttctgattgacccatac

SEQ ID NO: 282372 - DNA, 25 bp, probe
tcttcttttccaaatgctacatcat

SEQ ID NO: 282373 - DNA, 25 bp, probe
tcttctttgtcataaatcacaataa

SEQ ID NO: 282374 - DNA, 25 bp, probe
tcttctgtttcttacaacaaattca

SEQ ID NO: 282375 - DNA, 25 bp, probe
tcattctctccctaataaaaattgg

SEQ ID NO: 282376 - DNA, 25 bp, probe
tcatctttcccacctaaaaatgtct

SEQ ID NO: 282377 - DNA, 25 bp, probe
tcattgctctgcagaactcaaaaag

SEQ ID NO: 282378 - DNA, 25 bp, probe
tcttgcctcagaagagctgaaaact

SEQ ID NO: 282379 - DNA, 25 bp, probe
tcttcctcgcagaattcacagaatt

SEQ ID NO: 282380 - DNA, 25 bp, probe
tcttcctcgcagaattcacagaatt

SEQ ID NO: 282381 - DNA, 25 bp, probe
tcttcctgacagaatgccactttgt

SEQ ID NO: 282382 - DNA, 25 bp, probe
tcttcagtgaagcagccttactatt

SEQ ID NO: 282383 - DNA, 25 bp, probe
tcttcagtgaagcagccttactatt

SEQ ID NO: 282384 - DNA, 25 bp, probe
tcttcagtgtagagctcttgtttta

SEQ ID NO: 282385 - DNA, 25 bp, probe
tcttcaggttcatgctcatattcat

SEQ ID NO: 282386 - DNA, 25 bp, probe
tcttcatggtcttcggcatcatgct

SEQ ID NO: 282387 - DNA, 25 bp, probe
tcttcagatctttcagtgtcatgga

SEQ ID NO: 282388 - DNA, 25 bp, probe
tcttcgtgcatgtggctgtcagtga

SEQ ID NO: 282389 - DNA, 25 bp, probe
tcttctatgagatggccacaggccg

SEQ ID NO: 282390 - DNA, 25 bp, probe
tcttctatcaatcgggccaatccga

SEQ ID NO: 282391 - DNA, 25 bp, probe
tcttctatcaatcgggccaatccga

SEQ ID NO: 282392 - DNA, 25 bp, probe
tcttctataatctggggtcggaggg

SEQ ID NO: 282393 - DNA, 25 bp, probe
tcttcttgaatgggagctggacagg

SEQ ID NO: 282394 - DNA, 25 bp, probe
tcttcctcacagggtggagatcaga

SEQ ID NO: 282395 - DNA, 25 bp, probe
tcttctcccagactgctacagtaga

SEQ ID NO: 282396 - DNA, 25 bp, probe
tcttgccgccaacgatgcaagtgtg

SEQ ID NO: 282397 - DNA, 25 bp, probe
tcttccatcctgccggatgagtgtg

SEQ ID NO: 282398 - DNA, 25 bp, probe
tcttcctctcatgccaagttggctt

SEQ ID NO: 282399 - DNA, 25 bp, probe
tcttcatcccatgtcgtgttggtta

SEQ ID NO: 282400 - DNA, 25 bp, probe
tcttgcaacactatcctgtttctca

SEQ ID NO: 282401 - DNA, 25 bp, probe
tcattaaagtgcatagatttctatc

SEQ ID NO: 282402 - DNA, 25 bp, probe
tcattataaggcttaattgtggaaa

SEQ ID NO: 282403 - DNA, 25 bp, probe
tcttcacacccattacattgtggga

SEQ ID NO: 282404 - DNA, 25 bp, probe
tcttcacacccattacattgtggga

SEQ ID NO: 282405 - DNA, 25 bp, probe
tcttcaccacgatatcatgttacta

SEQ ID NO: 282406 - DNA, 25 bp, probe
tcttcaccacgatatcatgttacta

SEQ ID NO: 282407 - DNA, 25 bp, probe
tcttctccatcttcaattcattaca

SEQ ID NO: 282408 - DNA, 25 bp, probe
tcttccatcatttttatcatcacca

SEQ ID NO: 282409 - DNA, 25 bp, probe
tcttgacatcttttccatgatcatc

SEQ ID NO: 282410 - DNA, 25 bp, probe
tcattgggagctttgctctatcctg

SEQ ID NO: 282411 - DNA, 25 bp, probe
tcattggggagcactatgtccatgt

SEQ ID NO: 282412 - DNA, 25 bp, probe
tcttggccggatggctgaggcctgg

SEQ ID NO: 282413 - DNA, 25 bp, probe
tcttggccggagcaatttctgggct

SEQ ID NO: 282414 - DNA, 25 bp, probe
tcttgggctggacatataattgctg

SEQ ID NO: 282415 - DNA, 25 bp, probe
tcttctagtggacagaacatgctgt

SEQ ID NO: 282416 - DNA, 25 bp, probe
tcttccagcacggagacaacagctt

SEQ ID NO: 282417 - DNA, 25 bp, probe
tcatcttccaggagacagcacgctt

SEQ ID NO: 282418 - DNA, 25 bp, probe
tcttctcccagaagtcagacgtctg

SEQ ID NO: 282419 - DNA, 25 bp, probe
tcttctcccagaagtcagacgtctg

SEQ ID NO: 282420 - DNA, 25 bp, probe
tcttcgacagcatcgtcaacgacga

SEQ ID NO: 282421 - DNA, 25 bp, probe
tcatctcaatacactggaacgcctc

SEQ ID NO: 282422 - DNA, 25 bp, probe
tcttgacagacctgattaagcctgc

SEQ ID NO: 282423 - DNA, 25 bp, probe
tcttgaagcaactgaaccacccaaa

SEQ ID NO: 282424 - DNA, 25 bp, probe
tcttgaaagactgtgtaggcccaga

SEQ ID NO: 282425 - DNA, 25 bp, probe
tcttgaggagtcgctgttgaaccca

SEQ ID NO: 282426 - DNA, 25 bp, probe
tcttgaggagtcgctgttgaaccca

SEQ ID NO: 282427 - DNA, 25 bp, probe
tcttgaggagtcgctgttgaaccca

SEQ ID NO: 282428 - DNA, 25 bp, probe
tcttgggcatggcgagtctagaaac

SEQ ID NO: 282429 - DNA, 25 bp, probe
tcttggatcagctggagagcttaaa

SEQ ID NO: 282430 - DNA, 25 bp, probe
tcttggatgcagtggcagaatatga

SEQ ID NO: 282431 - DNA, 25 bp, probe
tcttgcagagcaagggcatcattta

SEQ ID NO: 282432 - DNA, 25 bp, probe
tcttcatgtttgcgctcatgcttca

SEQ ID NO: 282433 - DNA, 25 bp, probe
tcttcatgtttgcgctcatgcttca

SEQ ID NO: 282434 - DNA, 25 bp, probe
tcttcagggtgagccagcctcacct

SEQ ID NO: 282435 - DNA, 25 bp, probe
tcttcagggagtgtcacctcaaatg

SEQ ID NO: 282436 - DNA, 25 bp, probe
tcttccaggagcgagatccctccaa

SEQ ID NO: 282437 - DNA, 25 bp, probe
tcagaccaggtggaattacttaaat

SEQ ID NO: 282438 - DNA, 25 bp, probe
tcagaccggtgggctaggtttcaac

SEQ ID NO: 282439 - DNA, 25 bp, probe
tcatgactcctgtagggaagtttct

SEQ ID NO: 282440 - DNA, 25 bp, probe
tcatcccactgtgggggagtccctg

SEQ ID NO: 282441 - DNA, 25 bp, probe
tcatcccactgtgggggagtccctg

SEQ ID NO: 282442 - DNA, 25 bp, probe
tcatcccttgggataagccccagtc

SEQ ID NO: 282443 - DNA, 25 bp, probe
tcatcatgggggtcttaaccccagt

SEQ ID NO: 282444 - DNA, 25 bp, probe
tcatctacacggtcttcaaccagga

SEQ ID NO: 282445 - DNA, 25 bp, probe
tcatctacggctacttcaacgagaa

SEQ ID NO: 282446 - DNA, 25 bp, probe
tcatctacatttcttcacagctaaa

SEQ ID NO: 282447 - DNA, 25 bp, probe
tcatctacatttcttcacagctaaa

SEQ ID NO: 282448 - DNA, 25 bp, probe
tcagtactgactgtgtaagctaaat

SEQ ID NO: 282449 - DNA, 25 bp, probe
tcagtactgactgtgtaagctaaat

SEQ ID NO: 282450 - DNA, 25 bp, probe
tcatcatcacggggtgaaggtcaga

SEQ ID NO: 282451 - DNA, 25 bp, probe
tcttcgcgcctgggaagtgccagca

SEQ ID NO: 282452 - DNA, 25 bp, probe
tcttcgctgcacggatgggtcgaga

SEQ ID NO: 282453 - DNA, 25 bp, probe
tcttcttgcagccgtgtggacgaag

SEQ ID NO: 282454 - DNA, 25 bp, probe
tcttcttgcagccgtgtggacgaag

SEQ ID NO: 282455 - DNA, 25 bp, probe
tcttcttgcagccgtgtggacgaag

SEQ ID NO: 282456 - DNA, 25 bp, probe
tcttcatgtatccctgttactgata

SEQ ID NO: 282457 - DNA, 25 bp, probe
tcagtctaacaccatttactgtggc

SEQ ID NO: 282458 - DNA, 25 bp, probe
tcatcatgtaccgctgcgtgacggg

SEQ ID NO: 282459 - DNA, 25 bp, probe
cttctgtctcttgcataagcctcag

SEQ ID NO: 282460 - DNA, 25 bp, probe
tcatcaccacacgcacttatcagga

SEQ ID NO: 282461 - DNA, 25 bp, probe
tcattccataatgactgaatcaagg

SEQ ID NO: 282462 - DNA, 25 bp, probe
tcattccataatgactgaatcaagg

SEQ ID NO: 282463 - DNA, 25 bp, probe
tcttcctatctggaatgactagagg

SEQ ID NO: 282464 - DNA, 25 bp, probe
tcttctctctgcctaattgtcaagg

SEQ ID NO: 282465 - DNA, 25 bp, probe
tcttcccatcgtctgcatgataagc

SEQ ID NO: 282466 - DNA, 25 bp, probe
tcttcgccatgcccggatatcgggg

SEQ ID NO: 282467 - DNA, 25 bp, probe
tcagtggcttcggggtcatggagga

SEQ ID NO: 282468 - DNA, 25 bp, probe
tcttggctccactgggatgggagga

SEQ ID NO: 282469 - DNA, 25 bp, probe
tcttggctccactgggatgggagga

SEQ ID NO: 282470 - DNA, 25 bp, probe
tcttggtcccatggctgaagctgga

SEQ ID NO: 282471 - DNA, 25 bp, probe
tcttgtgtctgccatagtgacctaa

SEQ ID NO: 282472 - DNA, 25 bp, probe
tcttgtgctcagcatgattctttaa

SEQ ID NO: 282473 - DNA, 25 bp, probe
tcttgattcaggctttctttcctgt

SEQ ID NO: 282474 - DNA, 25 bp, probe
tcttgattcaggctttctttcctgt

SEQ ID NO: 282475 - DNA, 25 bp, probe
tcttgtcacatgatttcttttcttg

SEQ ID NO: 282476 - DNA, 25 bp, probe
tcttctcacatgattgtcatttcca

SEQ ID NO: 282477 - DNA, 25 bp, probe
tcatgttaagtcttgttttcagaac

SEQ ID NO: 282478 - DNA, 25 bp, probe
tcatgttaagtcttgttttcagaac

SEQ ID NO: 282479 - DNA, 25 bp, probe
tcattatacatggcttcttttatga

SEQ ID NO: 282480 - DNA, 25 bp, probe
tcttccacatagactttggatatat

SEQ ID NO: 282481 - DNA, 25 bp, probe
tcttcatcatcaacctctcggtagt

SEQ ID NO: 282482 - DNA, 25 bp, probe
tcttcatcatcaacctctcggtagt

SEQ ID NO: 282483 - DNA, 25 bp, probe
tcatatgctgacagctcttcacagt

SEQ ID NO: 282484 - DNA, 25 bp, probe
tcatcacaactaactccatcggaag

SEQ ID NO: 282485 - DNA, 25 bp, probe
tcatacaaattttcccagtgaataa

SEQ ID NO: 282486 - DNA, 25 bp, probe
tcatgtaacttttatgtctggacta

SEQ ID NO: 282487 - DNA, 25 bp, probe
tcttgacctgtggttctctggtgta

SEQ ID NO: 282488 - DNA, 25 bp, probe
tcttgaggattccttctgctgaggg

SEQ ID NO: 282489 - DNA, 25 bp, probe
tcttgagcagtggctggtccagggc

SEQ ID NO: 282490 - DNA, 25 bp, probe
tcttgacgtcaagtgatccacctgc

SEQ ID NO: 282491 - DNA, 25 bp, probe
tcatcgactccatggaccagtctgc

SEQ ID NO: 282492 - DNA, 25 bp, probe
tcatcgtcatcctggaaggcgtggt

SEQ ID NO: 282493 - DNA, 25 bp, probe
tcatcgtcatcctggaaggcgtggt

SEQ ID NO: 282494 - DNA, 25 bp, probe
tcattgtcatcgtggggcatgtggc

SEQ ID NO: 282495 - DNA, 25 bp, probe
tcatttcatcgcggactgtgcggcc

SEQ ID NO: 282496 - DNA, 25 bp, probe
tcatttcatcgcggactgtgcggcc

SEQ ID NO: 282497 - DNA, 25 bp, probe
tcttgtgagctcggactgctgatgc

SEQ ID NO: 282498 - DNA, 25 bp, probe
tcttgctggctgggcgagatgagca

SEQ ID NO: 282499 - DNA, 25 bp, probe
tcattgggctgcttgctgtatgagt

SEQ ID NO: 282500 - DNA, 25 bp, probe
tcattggcactgtccgatatgccag

SEQ ID NO: 282501 - DNA, 25 bp, probe
tcttgtgacatgggcaactccacgg

SEQ ID NO: 282502 - DNA, 25 bp, probe
tcttgtgacatgggcaactccacgg

SEQ ID NO: 282503 - DNA, 25 bp, probe
tcattggacatgagctgacccacgg

SEQ ID NO: 282504 - DNA, 25 bp, probe
tcatctagtcagagattcagtaagt

SEQ ID NO: 282505 - DNA, 25 bp, probe
tcactctgtagcgcatggttaaatg

SEQ ID NO: 282506 - DNA, 25 bp, probe
tcactctgtagcgcatggttaaatg

SEQ ID NO: 282507 - DNA, 25 bp, probe
tcagcacgttgctgtcgattaagac

SEQ ID NO: 282508 - DNA, 25 bp, probe
tcagcagctttgtgtaaaaatggca

SEQ ID NO: 282509 - DNA, 25 bp, probe
taccctttagttttaattgcacgtg

SEQ ID NO: 282510 - DNA, 25 bp, probe
tacaccttttttctacttcaggtat

SEQ ID NO: 282511 - DNA, 25 bp, probe
tcacccttttttattgcagttggtt

SEQ ID NO: 282512 - DNA, 25 bp, probe
tcaccccttgccataattactatgt

SEQ ID NO: 282513 - DNA, 25 bp, probe
tcaccccttggctttattttatata

SEQ ID NO: 282514 - DNA, 25 bp, probe
tcatcccaatttattttctaaaaca

SEQ ID NO: 282515 - DNA, 25 bp, probe
tcatccaagtttgtagttcatttaa

SEQ ID NO: 282516 - DNA, 25 bp, probe
tcatctacagtaaggacagtctctg

SEQ ID NO: 282517 - DNA, 25 bp, probe
tcttctgtgtggctgacagtctcag

SEQ ID NO: 282518 - DNA, 25 bp, probe
tcttcggggagctgctgactcagaa

SEQ ID NO: 282519 - DNA, 25 bp, probe
tcttccaggtagtgctgcttctgaa

SEQ ID NO: 282520 - DNA, 25 bp, probe
tcttctcagacatgtcttcttcaag

SEQ ID NO: 282521 - DNA, 25 bp, probe
tcttctacctgagctcagctgtcaa

SEQ ID NO: 282522 - DNA, 25 bp, probe
tcttctacctgagctcagctgtcaa

SEQ ID NO: 282523 - DNA, 25 bp, probe
tcatatatacctcaaggattcaaaa

SEQ ID NO: 282524 - DNA, 25 bp, probe
tcataatagctccaatgtgaaaaaa

SEQ ID NO: 282525 - DNA, 25 bp, probe
tcatactttagcttgtgaagaagat

SEQ ID NO: 282526 - DNA, 25 bp, probe
tcatcagttcattttggaacagcag

SEQ ID NO: 282527 - DNA, 25 bp, probe
tcatccatcgatgtttggtcagctg

SEQ ID NO: 282528 - DNA, 25 bp, probe
tcattcatggcagattgtttgtgct

SEQ ID NO: 282529 - DNA, 25 bp, probe
tcttctggcagctagttagtgccat

SEQ ID NO: 282530 - DNA, 25 bp, probe
tcttgcggcacaagtacctcatcaa

SEQ ID NO: 282531 - DNA, 25 bp, probe
tcttgcattcaaacctccttcaaaa

SEQ ID NO: 282532 - DNA, 25 bp, probe
tcttcccatgtagaccttcagcaaa

SEQ ID NO: 282533 - DNA, 25 bp, probe
tttctggcttaccccttggaataag

SEQ ID NO: 282534 - DNA, 25 bp, probe
tttctggctttcccagactagaaat

SEQ ID NO: 282535 - DNA, 25 bp, probe
tcttctgtgctttccacaaataaag

SEQ ID NO: 282536 - DNA, 25 bp, probe
tcttgctgtcttgggcatcaaaaca

SEQ ID NO: 282537 - DNA, 25 bp, probe
tcttgcttcggccagaagtagcaca

SEQ ID NO: 282538 - DNA, 25 bp, probe
tcaggccatttgcatgaaattcaca

SEQ ID NO: 282539 - DNA, 25 bp, probe
tcattgtctttccatgaaacgaagt

SEQ ID NO: 282540 - DNA, 25 bp, probe
tcttgaccgtcacgaagcacacggt

SEQ ID NO: 282541 - DNA, 25 bp, probe
tcttgacggtcacgaagcacagagt

SEQ ID NO: 282542 - DNA, 25 bp, probe
tcttgtccgatcctgagttgcagag

SEQ ID NO: 282543 - DNA, 25 bp, probe
tcttgtccgatcctgagttgcagag

SEQ ID NO: 282544 - DNA, 25 bp, probe
tcaagtagctgatgtgcagttgaga

SEQ ID NO: 282545 - DNA, 25 bp, probe
tcatagtcctctactgcatgaagaa

SEQ ID NO: 282546 - DNA, 25 bp, probe
tcatagtcctctactgcatgaagaa

SEQ ID NO: 282547 - DNA, 25 bp, probe
tcaggctgccacactgaaccatatc

SEQ ID NO: 282548 - DNA, 25 bp, probe
tcaggctgccacactgaaccatatc

SEQ ID NO: 282549 - DNA, 25 bp, probe
tcaggctgccacactgaaccatatc

SEQ ID NO: 282550 - DNA, 25 bp, probe
tcaggctgccacactgaaccatatc

SEQ ID NO: 282551 - DNA, 25 bp, probe
tcaggctgccacactgaaccatatc

SEQ ID NO: 282552 - DNA, 25 bp, probe
tcaggctgccacactgaaccatatc

SEQ ID NO: 282553 - DNA, 25 bp, probe
tcagctatacacaattcccaaactc

SEQ ID NO: 282554 - DNA, 25 bp, probe
tcaggattcaacaccaaccagtcca

SEQ ID NO: 282555 - DNA, 25 bp, probe
tcaggatcttaaaactaacacttat

SEQ ID NO: 282556 - DNA, 25 bp, probe
tcaggatttatacacaagatttatg

SEQ ID NO: 282557 - DNA, 25 bp, probe
taggaaagataccgaagattagtgg

SEQ ID NO: 282558 - DNA, 25 bp, probe
tagtataagtatccaaagaaaagtt

SEQ ID NO: 282559 - DNA, 25 bp, probe
tcaggaaagtaaggcaggaaaagtt

SEQ ID NO: 282560 - DNA, 25 bp, probe
tcagtgtagagaaaaccgtgaagag

SEQ ID NO: 282561 - DNA, 25 bp, probe
tcagattcggacaatcgaccgaaag

SEQ ID NO: 282562 - DNA, 25 bp, probe
tcatcatttgcttcaagccccgaaa

SEQ ID NO: 282563 - DNA, 25 bp, probe
tcatctacagtgtcaagacccaaca

SEQ ID NO: 282564 - DNA, 25 bp, probe
tcatcttcctgaaaattctcaagct

SEQ ID NO: 282565 - DNA, 25 bp, probe
tcatttcattaagatctctaatctg

SEQ ID NO: 282566 - DNA, 25 bp, probe
tcatttcagcagtagcgtcttaaac

SEQ ID NO: 282567 - DNA, 25 bp, probe
tcattatcgaagtgtgtatcaaaag

SEQ ID NO: 282568 - DNA, 25 bp, probe
tcatcattgctgaagtcgtgaacaa

SEQ ID NO: 282569 - DNA, 25 bp, probe
tcatcattgctgaagtcgtgaacaa

SEQ ID NO: 282570 - DNA, 25 bp, probe
tcactttggggcctcattaaccctt

SEQ ID NO: 282571 - DNA, 25 bp, probe
tcatttcgctgggactcatttccca

SEQ ID NO: 282572 - DNA, 25 bp, probe
tcatttttggcctctcatgttccaa

SEQ ID NO: 282573 - DNA, 25 bp, probe
tcattggttcccacgatgtctacaa

SEQ ID NO: 282574 - DNA, 25 bp, probe
tcatggacttcccaacagattccac

SEQ ID NO: 282575 - DNA, 25 bp, probe
tcaggacccgtcctcaataacaatc

SEQ ID NO: 282576 - DNA, 25 bp, probe
tcaggaatacctctactaacaacca

SEQ ID NO: 282577 - DNA, 25 bp, probe
taaaaccctatttctctaagaccat

SEQ ID NO: 282578 - DNA, 25 bp, probe
tcaccgaccctgatatcctgaaaac

SEQ ID NO: 282579 - DNA, 25 bp, probe
tacttaccctttttatgcatatcaa

SEQ ID NO: 282580 - DNA, 25 bp, probe
tcatttaccaagttattgattacaa

SEQ ID NO: 282581 - DNA, 25 bp, probe
tcatttccccagttggtgtttccaa

SEQ ID NO: 282582 - DNA, 25 bp, probe
tcatgtacttcgcttaagtttctaa

SEQ ID NO: 282583 - DNA, 25 bp, probe
tcaggactgcctatgtacaatttta

SEQ ID NO: 282584 - DNA, 25 bp, probe
tcaggcccctgagttactatttgga

SEQ ID NO: 282585 - DNA, 25 bp, probe
tcaggcactttggttaatagttgaa

SEQ ID NO: 282586 - DNA, 25 bp, probe
tcaggcactttggttaatagttgaa

SEQ ID NO: 282587 - DNA, 25 bp, probe
tcattactgtctgtggctaagtccc

SEQ ID NO: 282588 - DNA, 25 bp, probe
tcattactgtctgtggctaagtccc

SEQ ID NO: 282589 - DNA, 25 bp, probe
tcagtttttaataccaagtccttag

SEQ ID NO: 282590 - DNA, 25 bp, probe
tcagtagttcctacccatagtcttt

SEQ ID NO: 282591 - DNA, 25 bp, probe
tcagaaaaccaacgccaagatccct

SEQ ID NO: 282592 - DNA, 25 bp, probe
tcagaaaccagttggctctagctac

SEQ ID NO: 282593 - DNA, 25 bp, probe
tcagaaaagagttgggtcctatacc

SEQ ID NO: 282594 - DNA, 25 bp, probe
tcagatgaggaagtaagggtttagc

SEQ ID NO: 282595 - DNA, 25 bp, probe
tagaggaaatttaggcgtgcgggcg

SEQ ID NO: 282596 - DNA, 25 bp, probe
tcagcattaaatataacgtcgaggt

SEQ ID NO: 282597 - DNA, 25 bp, probe
tcagctgtggcatattacctgtaac

SEQ ID NO: 282598 - DNA, 25 bp, probe
tcatcgggacttggcagccagaaac

SEQ ID NO: 282599 - DNA, 25 bp, probe
tcatccggaatttgggagaacacat

SEQ ID NO: 282600 - DNA, 25 bp, probe
tcatccggaatttgggagaacacat

SEQ ID NO: 282601 - DNA, 25 bp, probe
tcatcggaaatatcgggacacactg

SEQ ID NO: 282602 - DNA, 25 bp, probe
tcatcggcttggtactgaaaccctg

SEQ ID NO: 282603 - DNA, 25 bp, probe
tcatcggcttggtactgaaaccctg

SEQ ID NO: 282604 - DNA, 25 bp, probe
tcatcggccaagtgtgcgatacccc

SEQ ID NO: 282605 - DNA, 25 bp, probe
tcatcgacctaatggccatcagcaa

SEQ ID NO: 282606 - DNA, 25 bp, probe
tcatcagaatctgtcggccaaaagc

SEQ ID NO: 282607 - DNA, 25 bp, probe
tcatcaacagccttcgcaacaaaga

SEQ ID NO: 282608 - DNA, 25 bp, probe
tcatcacacgctacaccaagaagac

SEQ ID NO: 282609 - DNA, 25 bp, probe
tcattcacatgcttcagcaccagtt

SEQ ID NO: 282610 - DNA, 25 bp, probe
tcattcacatgcttcagcaccagtt

SEQ ID NO: 282611 - DNA, 25 bp, probe
tcatttctgagtcgcctgcattatc

SEQ ID NO: 282612 - DNA, 25 bp, probe
tcatcctgtgcaggggccattcaac

SEQ ID NO: 282613 - DNA, 25 bp, probe
tcatcctgaacctgagttcaaccaa

SEQ ID NO: 282614 - DNA, 25 bp, probe
tcatcggcgtcccgaaggaagctca

SEQ ID NO: 282615 - DNA, 25 bp, probe
tcattgaggtcctgggcctatgtca

SEQ ID NO: 282616 - DNA, 25 bp, probe
tagagaatgtcctggcgtcggtttt

SEQ ID NO: 282617 - DNA, 25 bp, probe
tatggagattggtgggacgagttca

SEQ ID NO: 282618 - DNA, 25 bp, probe
taggaacaggtcccaagcggttgag

SEQ ID NO: 282619 - DNA, 25 bp, probe
taggaacaggtcccaagcggttgag

SEQ ID NO: 282620 - DNA, 25 bp, probe
tcaggaaatggggtatgcagggtct

SEQ ID NO: 282621 - DNA, 25 bp, probe
tcatggaattggcctattggcaaga

SEQ ID NO: 282622 - DNA, 25 bp, probe
tcatgttcattgggtttatcctgaa

SEQ ID NO: 282623 - DNA, 25 bp, probe
tcatgcttcttgtggtctggactga

SEQ ID NO: 282624 - DNA, 25 bp, probe
tcatctacacgctggccagcaagga

SEQ ID NO: 282625 - DNA, 25 bp, probe
tcatctacacgctggccagcaagga

SEQ ID NO: 282626 - DNA, 25 bp, probe
tcactaccgctttgcaatcactgtg

SEQ ID NO: 282627 - DNA, 25 bp, probe
tcattatccttttgccagcattctg

SEQ ID NO: 282628 - DNA, 25 bp, probe
tcatttcacttatcttgcatatctt

SEQ ID NO: 282629 - DNA, 25 bp, probe
tcatttgactccttattttctgctg

SEQ ID NO: 282630 - DNA, 25 bp, probe
tcattctggcttctatttctatgtg

SEQ ID NO: 282631 - DNA, 25 bp, probe
tcatggtacattagtagttctttgt

SEQ ID NO: 282632 - DNA, 25 bp, probe
tcatcagtatcagttccaggctcat

SEQ ID NO: 282633 - DNA, 25 bp, probe
tcatcaatgtacatgccaacataaa

SEQ ID NO: 282634 - DNA, 25 bp, probe
tcatcctctacattccatattcagt

SEQ ID NO: 282635 - DNA, 25 bp, probe
tcatcctctacattccatattcagt

SEQ ID NO: 282636 - DNA, 25 bp, probe
tcattgtgctgaacctcatctttgg

SEQ ID NO: 282637 - DNA, 25 bp, probe
tcttgtggcatatccattgtggaaa

SEQ ID NO: 282638 - DNA, 25 bp, probe
tcttggtcgtcctttgagtgacaac

SEQ ID NO: 282639 - DNA, 25 bp, probe
tcttggctcgggtgcagagttcacc

SEQ ID NO: 282640 - DNA, 25 bp, probe
tcttggctcgggtgcagagttcacc

SEQ ID NO: 282641 - DNA, 25 bp, probe
tcttggttggtgaaggagattccgt

SEQ ID NO: 282642 - DNA, 25 bp, probe
tcttggttggtgaaggagattccgt

SEQ ID NO: 282643 - DNA, 25 bp, probe
tcttggtgtggtgcagggatcctga

SEQ ID NO: 282644 - DNA, 25 bp, probe
tcattcgtgggaacagcgcagtacg

SEQ ID NO: 282645 - DNA, 25 bp, probe
tcttgcatggagcaatctcgcagtg

SEQ ID NO: 282646 - DNA, 25 bp, probe
tcttgcaatgagcacctgtgctgtc

SEQ ID NO: 282647 - DNA, 25 bp, probe
tcattaatgagattgcactggctgc

SEQ ID NO: 282648 - DNA, 25 bp, probe
tcattacatatgatgcctaccctaa

SEQ ID NO: 282649 - DNA, 25 bp, probe
tcattacatatgatgcctaccctaa

SEQ ID NO: 282650 - DNA, 25 bp, probe
tcttggatatatgccataccccagc

SEQ ID NO: 282651 - DNA, 25 bp, probe
tcttggatatatgccataccccagc

SEQ ID NO: 282652 - DNA, 25 bp, probe
tcatgggctattccacaaagccaca

SEQ ID NO: 282653 - DNA, 25 bp, probe
tcattgactttggatcaagctgtta

SEQ ID NO: 282654 - DNA, 25 bp, probe
tcattgacttaggagcctgctctgt

SEQ ID NO: 282655 - DNA, 25 bp, probe
tcattgaaatgcacagatctgcttg

SEQ ID NO: 282656 - DNA, 25 bp, probe
tcttgacactcacaatctcgttcac

SEQ ID NO: 282657 - DNA, 25 bp, probe
tcattacccagtctcatctgtgtac

SEQ ID NO: 282658 - DNA, 25 bp, probe
tcattaccctgccattcatgtgtat

SEQ ID NO: 282659 - DNA, 25 bp, probe
tcatcaaccctgtcatatatgcttt

SEQ ID NO: 282660 - DNA, 25 bp, probe
tcatcaactgcatcatctactttaa

SEQ ID NO: 282661 - DNA, 25 bp, probe
tcatcatcacatggaccccgtataa

SEQ ID NO: 282662 - DNA, 25 bp, probe
tcatcatcacatggaccccgtataa

SEQ ID NO: 282663 - DNA, 25 bp, probe
tcatcacctgtgtacctaggtgaga

SEQ ID NO: 282664 - DNA, 25 bp, probe
tcatagacagttttgctaatggaat

SEQ ID NO: 282665 - DNA, 25 bp, probe
tcattgctgcgatcatgtccaagga

SEQ ID NO: 282666 - DNA, 25 bp, probe
tcattgctgcagatatcaaagggac

SEQ ID NO: 282667 - DNA, 25 bp, probe
tcagtcgagtttccagagcaggagg

SEQ ID NO: 282668 - DNA, 25 bp, probe
tcattctggtaccacaggcagtttg

SEQ ID NO: 282669 - DNA, 25 bp, probe
tcatctgggctgtcgacaggtgtct

SEQ ID NO: 282670 - DNA, 25 bp, probe
tcatctgggctgtcgacaggtgtct

SEQ ID NO: 282671 - DNA, 25 bp, probe
tcttggcagtgtccacagagtattt

SEQ ID NO: 282672 - DNA, 25 bp, probe
tcttggcagtgtccacagagtattt

SEQ ID NO: 282673 - DNA, 25 bp, probe
tcatgtgggccacacaagtgcagta

SEQ ID NO: 282674 - DNA, 25 bp, probe
tcttggtgcctaacctggattagta

SEQ ID NO: 282675 - DNA, 25 bp, probe
tcttgatgatccaagccctttttgt

SEQ ID NO: 282676 - DNA, 25 bp, probe
tcttgtacaaatgcatgctttttca

SEQ ID NO: 282677 - DNA, 25 bp, probe
tcttgaatcagagtatcattgtctt

SEQ ID NO: 282678 - DNA, 25 bp, probe
tcttggaagactacttcactgctac

SEQ ID NO: 282679 - DNA, 25 bp, probe
tcttggaagactacttcactgctac

SEQ ID NO: 282680 - DNA, 25 bp, probe
tcttgtgaaggcactgcgcagcctc

SEQ ID NO: 282681 - DNA, 25 bp, probe
tcttgtgaagtgatgcagctgacct

SEQ ID NO: 282682 - DNA, 25 bp, probe
tcattggagaggatgccgcctgcat

SEQ ID NO: 282683 - DNA, 25 bp, probe
tcatctagtgatcttttgcatcatg

SEQ ID NO: 282684 - DNA, 25 bp, probe
tcatcgcgccaaattttgcgctcgg

SEQ ID NO: 282685 - DNA, 25 bp, probe
tcatcgcgccaaattttgcgctcgg

SEQ ID NO: 282686 - DNA, 25 bp, probe
tcatgcatgctgccattaacttctc

SEQ ID NO: 282687 - DNA, 25 bp, probe
tcatcactggctactacatccttgt

SEQ ID NO: 282688 - DNA, 25 bp, probe
tcatcactggctactacatccttgt

SEQ ID NO: 282689 - DNA, 25 bp, probe
tcatcatctctgttatacacctgta

SEQ ID NO: 282690 - DNA, 25 bp, probe
tcatctctgcttggattattttaaa

SEQ ID NO: 282691 - DNA, 25 bp, probe
tcatttgcttctgctaggttaaact

SEQ ID NO: 282692 - DNA, 25 bp, probe
tcattctgagtctttagttttagtc

SEQ ID NO: 282693 - DNA, 25 bp, probe
tcatttggaaataagctgccttgag

SEQ ID NO: 282694 - DNA, 25 bp, probe
tcatgctcggattcaagcagctgct

SEQ ID NO: 282695 - DNA, 25 bp, probe
tcatttgtatccaaggtgctgaatc

SEQ ID NO: 282696 - DNA, 25 bp, probe
tcatctggagccctagtatctaatt

SEQ ID NO: 282697 - DNA, 25 bp, probe
tcatcttgtggcttagttgtagaag

SEQ ID NO: 282698 - DNA, 25 bp, probe
tcattgtgctggtccgcgtgaagaa

SEQ ID NO: 282699 - DNA, 25 bp, probe
tcattgtccggaatggtgaaatcat

SEQ ID NO: 282700 - DNA, 25 bp, probe
tcatgtaccggaagttcactacaga

SEQ ID NO: 282701 - DNA, 25 bp, probe
tcatgtaaccgagtgtcctcttgcg

SEQ ID NO: 282702 - DNA, 25 bp, probe
tcagtaaacaggctgcctctccagg

SEQ ID NO: 282703 - DNA, 25 bp, probe
tcaggaaacggctttgtccgcacaa

SEQ ID NO: 282704 - DNA, 25 bp, probe
tcaggagaccggcctgttcctgagt

SEQ ID NO: 282705 - DNA, 25 bp, probe
tcatcgtagccgttctgattcaaga

SEQ ID NO: 282706 - DNA, 25 bp, probe
tcatttcatcctggtcagtctagag

SEQ ID NO: 282707 - DNA, 25 bp, probe
tcattgtaccattgctcaatcccat

SEQ ID NO: 282708 - DNA, 25 bp, probe
tcatctaaccattacagcctgtatt

SEQ ID NO: 282709 - DNA, 25 bp, probe
tcatctaagctcccacaatttctta

SEQ ID NO: 282710 - DNA, 25 bp, probe
tcattaagatctctaatctgttttg

SEQ ID NO: 282711 - DNA, 25 bp, probe
tcatttgcaactcccacttgtattt

SEQ ID NO: 282712 - DNA, 25 bp, probe
tcatggacaaaacctgctggaattt

SEQ ID NO: 282713 - DNA, 25 bp, probe
tcatggacaaaacctgctggaattt

SEQ ID NO: 282714 - DNA, 25 bp, probe
tcatgtgaaacagtggttgccaaaa

SEQ ID NO: 282715 - DNA, 25 bp, probe
tcatgggaaattgatccaaaggacc

SEQ ID NO: 282716 - DNA, 25 bp, probe
tcatacgggattttgccttcactga

SEQ ID NO: 282717 - DNA, 25 bp, probe
tcatacgggattttgccttcactga

SEQ ID NO: 282718 - DNA, 25 bp, probe
tcatttgggagatggctcgtcgttg

SEQ ID NO: 282719 - DNA, 25 bp, probe
tcatttctgtggtgttcagtggggg

SEQ ID NO: 282720 - DNA, 25 bp, probe
tcattcacaggtaaccgcgggggtg

SEQ ID NO: 282721 - DNA, 25 bp, probe
tcattgccaagtacctcggggggct

SEQ ID NO: 282722 - DNA, 25 bp, probe
tcttgctgggggaccagggctgtgg

SEQ ID NO: 282723 - DNA, 25 bp, probe
tcttggtgggtgttcagtgagtgta

SEQ ID NO: 282724 - DNA, 25 bp, probe
tcttgggaggagtggtgggtgcagt

SEQ ID NO: 282725 - DNA, 25 bp, probe
tcttggctagtggtggctggtggtc

SEQ ID NO: 282726 - DNA, 25 bp, probe
tcttggctagtggtggctggtggtc

SEQ ID NO: 282727 - DNA, 25 bp, probe
tcattggcaaaggtgtgggggccag

SEQ ID NO: 282728 - DNA, 25 bp, probe
tcattccaacgactgagtgaggtct

SEQ ID NO: 282729 - DNA, 25 bp, probe
tcttgcatccctgtatggaggtctc

SEQ ID NO: 282730 - DNA, 25 bp, probe
tcttgtgcgcacacttgatgaaggt

SEQ ID NO: 282731 - DNA, 25 bp, probe
tcagctgatcgcccgtgtagaaggc

SEQ ID NO: 282732 - DNA, 25 bp, probe
tcagatcatccacagttacacggaa

SEQ ID NO: 282733 - DNA, 25 bp, probe
tcatcacaccagcaattaccagagt

SEQ ID NO: 282734 - DNA, 25 bp, probe
tcatgcacaatccaaaagactataa

SEQ ID NO: 282735 - DNA, 25 bp, probe
tcatcccatatgcatgagatactaa

SEQ ID NO: 282736 - DNA, 25 bp, probe
tcatcatccaagtttgtagttcatt

SEQ ID NO: 282737 - DNA, 25 bp, probe
tcatcagccaggtgttggccaccta

SEQ ID NO: 282738 - DNA, 25 bp, probe
tcatcagccaggtgttggccaccta

SEQ ID NO: 282739 - DNA, 25 bp, probe
tcatcagccaggtgttggccaccta

SEQ ID NO: 282740 - DNA, 25 bp, probe
tcatcaggcagcgggtagggcacag

SEQ ID NO: 282741 - DNA, 25 bp, probe
tcatcagccacgtgtagggtgtgag

SEQ ID NO: 282742 - DNA, 25 bp, probe
tcatagccctgtctcaagtcttgat

SEQ ID NO: 282743 - DNA, 25 bp, probe
tcatagccctgtctcaagtcttgat

SEQ ID NO: 282744 - DNA, 25 bp, probe
tcatctctccggtaagattttattg

SEQ ID NO: 282745 - DNA, 25 bp, probe
tcatccctacaacaatgtttatatg

SEQ ID NO: 282746 - DNA, 25 bp, probe
tcatcccaatattgtcaaacttata

SEQ ID NO: 282747 - DNA, 25 bp, probe
tcatcccaatattgtcaaacttata

SEQ ID NO: 282748 - DNA, 25 bp, probe
tcatccatgacttggcccaagttta

SEQ ID NO: 282749 - DNA, 25 bp, probe
tcatccaggcctgccgtggtgataa

SEQ ID NO: 282750 - DNA, 25 bp, probe
tcatccatggacccctgatgattcc

SEQ ID NO: 282751 - DNA, 25 bp, probe
tcatccatgagagctttggttcccc

SEQ ID NO: 282752 - DNA, 25 bp, probe
tcatgcgctcgatgtaagccattcc

SEQ ID NO: 282753 - DNA, 25 bp, probe
tcatgcgctcgatgtaagccattcc

SEQ ID NO: 282754 - DNA, 25 bp, probe
tcatgatccgagcgaggcctaacac

SEQ ID NO: 282755 - DNA, 25 bp, probe
tcatgagcctggaaagaatcaaaac

SEQ ID NO: 282756 - DNA, 25 bp, probe
tcatgcagtctgaaaagggaagaaa

SEQ ID NO: 282757 - DNA, 25 bp, probe
tcatgttgcagaaaaaggttatacg

SEQ ID NO: 282758 - DNA, 25 bp, probe
tcatattcaatatacatgtttacat

SEQ ID NO: 282759 - DNA, 25 bp, probe
tcataatcaaatatcgctttacatg

SEQ ID NO: 282760 - DNA, 25 bp, probe
tcatcaccaacaaatggtttcaacc

SEQ ID NO: 282761 - DNA, 25 bp, probe
tcagaccaaacagtgctgtttcccg

SEQ ID NO: 282762 - DNA, 25 bp, probe
tcatggaagagatccgcttcccgcg

SEQ ID NO: 282763 - DNA, 25 bp, probe
tcatggaagagatccgcttcccgcg

SEQ ID NO: 282764 - DNA, 25 bp, probe
tcatcgacgagaacccagagctgtt

SEQ ID NO: 282765 - DNA, 25 bp, probe
tcatgcgaaggaactctctgagtgg

SEQ ID NO: 282766 - DNA, 25 bp, probe
tcatccgaaatggctctgaggtgcg

SEQ ID NO: 282767 - DNA, 25 bp, probe
tcatcctgaacgacatcaccgagga

SEQ ID NO: 282768 - DNA, 25 bp, probe
tcattgctgaactgttcttcaggcc

SEQ ID NO: 282769 - DNA, 25 bp, probe
tcattctgtacactgaccttaggca

SEQ ID NO: 282770 - DNA, 25 bp, probe
tcatttttcagtacttctacagaat

SEQ ID NO: 282771 - DNA, 25 bp, probe
tcatttttagcacttctcaccagag

SEQ ID NO: 282772 - DNA, 25 bp, probe
tcttgtgttacatcatctcattaag

SEQ ID NO: 282773 - DNA, 25 bp, probe
tcttgtgcgtgagagcctcagccag

SEQ ID NO: 282774 - DNA, 25 bp, probe
tcattggcaatgtttcgatagacag

SEQ ID NO: 282775 - DNA, 25 bp, probe
tcatctggacacccttggaagcaaa

SEQ ID NO: 282776 - DNA, 25 bp, probe
tcatcatcaacctctcggtagtaga

SEQ ID NO: 282777 - DNA, 25 bp, probe
tcatcatccccgcccggatgaagag

SEQ ID NO: 282778 - DNA, 25 bp, probe
tcatcatccccgcccggatgaagag

SEQ ID NO: 282779 - DNA, 25 bp, probe
tcattcccaaaccggtggagcagtg

SEQ ID NO: 282780 - DNA, 25 bp, probe
tcatgctaagactcagtggggaggg

SEQ ID NO: 282781 - DNA, 25 bp, probe
tcatctagtcccctgggggagggga

SEQ ID NO: 282782 - DNA, 25 bp, probe
tcattgactcaggcctggggccagg

SEQ ID NO: 282783 - DNA, 25 bp, probe
tcatgtaccgctgcgtgacggggac

SEQ ID NO: 282784 - DNA, 25 bp, probe
tcatgtaccgctgcgtgacggggac

SEQ ID NO: 282785 - DNA, 25 bp, probe
tcatttcctggtatgacaacgaatt

SEQ ID NO: 282786 - DNA, 25 bp, probe
tcatttcctggtatgacaacgaatt

SEQ ID NO: 282787 - DNA, 25 bp, probe
tcatttaactctttgaaactgtatc

SEQ ID NO: 282788 - DNA, 25 bp, probe
tcttgttatcttttgtgtcctgtaa

SEQ ID NO: 282789 - DNA, 25 bp, probe
tcttgttttaccggctcctgaaaga

SEQ ID NO: 282790 - DNA, 25 bp, probe
tcttgttttaccctatacatccaca

SEQ ID NO: 282791 - DNA, 25 bp, probe
tcttgttttctccttaggtggccat

SEQ ID NO: 282792 - DNA, 25 bp, probe
tcatgtttcaacttttgcggggcct

SEQ ID NO: 282793 - DNA, 25 bp, probe
tcatgtttcaacttttgcggggcct

SEQ ID NO: 282794 - DNA, 25 bp, probe
tcatcctttacactctagtggtcgc

SEQ ID NO: 282795 - DNA, 25 bp, probe
tcatccttaaagatgtggctgcact

SEQ ID NO: 282796 - DNA, 25 bp, probe
tcaccttgaaagcagtagcatcacc

SEQ ID NO: 282797 - DNA, 25 bp, probe
tcatccgggaggtcaatgccatgca

SEQ ID NO: 282798 - DNA, 25 bp, probe
tcatccgggatgtgagtgccagggt

SEQ ID NO: 282799 - DNA, 25 bp, probe
tcatcatcgccgagatggtcggggt

SEQ ID NO: 282800 - DNA, 25 bp, probe
tcatcatcgccgagatggtcggggt

SEQ ID NO: 282801 - DNA, 25 bp, probe
tcatctcgcgagggaagcccgtgga

SEQ ID NO: 282802 - DNA, 25 bp, probe
tcatcctggatgagaaccaattgga

SEQ ID NO: 282803 - DNA, 25 bp, probe
tcatcctggatgagaaccaattgga

SEQ ID NO: 282804 - DNA, 25 bp, probe
tcatactaagaattcctcactctga

SEQ ID NO: 282805 - DNA, 25 bp, probe
tcatactaagaattcctcactctga

SEQ ID NO: 282806 - DNA, 25 bp, probe
tcagattaaagctcacccctggaca

SEQ ID NO: 282807 - DNA, 25 bp, probe
tcagaaaattgtttcccttggaatg

SEQ ID NO: 282808 - DNA, 25 bp, probe
tcagaacaattgaactcccctaaac

SEQ ID NO: 282809 - DNA, 25 bp, probe
tcaggggttgtacctccataaaaca

SEQ ID NO: 282810 - DNA, 25 bp, probe
tcagggggagtctttgcaccaaaga

SEQ ID NO: 282811 - DNA, 25 bp, probe
tcagtggggagggggtgccaccagg

SEQ ID NO: 282812 - DNA, 25 bp, probe
tcaggggagggatggtatgccgcat

SEQ ID NO: 282813 - DNA, 25 bp, probe
tcatggcgaagagacttgggcccat

SEQ ID NO: 282814 - DNA, 25 bp, probe
tcaggccaggagggccgagggccac

SEQ ID NO: 282815 - DNA, 25 bp, probe
tcaggagcaggtgcccgttgaggag

SEQ ID NO: 282816 - DNA, 25 bp, probe
tcagggtggcctggacagagaagaa

SEQ ID NO: 282817 - DNA, 25 bp, probe
tcaacttttctgagctggtgtaagc

SEQ ID NO: 282818 - DNA, 25 bp, probe
tcatttttcttgtacatatgtgtaa

SEQ ID NO: 282819 - DNA, 25 bp, probe
tcattctctttctaatcttgctggt

SEQ ID NO: 282820 - DNA, 25 bp, probe
tcatactccatcatcagcaacctgg

SEQ ID NO: 282821 - DNA, 25 bp, probe
tcatggccacatccttaaccttggc

SEQ ID NO: 282822 - DNA, 25 bp, probe
tcagagcgacgtctggtcctatggc

SEQ ID NO: 282823 - DNA, 25 bp, probe
tcatggcaggggtggtttatctgca

SEQ ID NO: 282824 - DNA, 25 bp, probe
tcatgaggggcctatgcctttactc

SEQ ID NO: 282825 - DNA, 25 bp, probe
tcatagggtatcaatatctcttatt

SEQ ID NO: 282826 - DNA, 25 bp, probe
tcatttgttcacaacatgcgtattt

SEQ ID NO: 282827 - DNA, 25 bp, probe
tcatctgtttccactgagtctgagt

SEQ ID NO: 282828 - DNA, 25 bp, probe
tcatgtgcacttaaacgtgttgtgg

SEQ ID NO: 282829 - DNA, 25 bp, probe
tcatgtccttcaaatctgttagcgt

SEQ ID NO: 282830 - DNA, 25 bp, probe
tcattccttcattgatttacatttt

SEQ ID NO: 282831 - DNA, 25 bp, probe
tcaggaactcagtttaactattatt

SEQ ID NO: 282832 - DNA, 25 bp, probe
tcagaaacccttcagtgctacattt

SEQ ID NO: 282833 - DNA, 25 bp, probe
tcacaacagcccactttttctttgg

SEQ ID NO: 282834 - DNA, 25 bp, probe
tagtcacaacctgttttgtttttgt

SEQ ID NO: 282835 - DNA, 25 bp, probe
tcagtataaattgtcgtttttttct

SEQ ID NO: 282836 - DNA, 25 bp, probe
tatttttactttgtttccttcatct

SEQ ID NO: 282837 - DNA, 25 bp, probe
tcatttttactactttgaccccact

SEQ ID NO: 282838 - DNA, 25 bp, probe
tcatttttaccaatttgaacagttt

SEQ ID NO: 282839 - DNA, 25 bp, probe
tcatcttttttctttttccagtcta

SEQ ID NO: 282840 - DNA, 25 bp, probe
tcaggtctttcatctcattttaact

SEQ ID NO: 282841 - DNA, 25 bp, probe
tcagagttcgaaggctttgagtata

SEQ ID NO: 282842 - DNA, 25 bp, probe
tcatgaatccgaaactctgtgtctt

SEQ ID NO: 282843 - DNA, 25 bp, probe
tcatcagattcgaaattctgtgcca

SEQ ID NO: 282844 - DNA, 25 bp, probe
tcatcaagattttaccagtccagat

SEQ ID NO: 282845 - DNA, 25 bp, probe
tcatagtgtttcccacgtggcagat

SEQ ID NO: 282846 - DNA, 25 bp, probe
tcatagttttcaccactgtgatctt

SEQ ID NO: 282847 - DNA, 25 bp, probe
tcatttcttatgttctcattatctc

SEQ ID NO: 282848 - DNA, 25 bp, probe
tcatagattttgctgttatattctc

SEQ ID NO: 282849 - DNA, 25 bp, probe
tcatagatgtttccttgccttgttg

SEQ ID NO: 282850 - DNA, 25 bp, probe
tcattgtgattttcgacctcatggg

SEQ ID NO: 282851 - DNA, 25 bp, probe
tcttggatgtggtcagctctccagg

SEQ ID NO: 282852 - DNA, 25 bp, probe
tcattgtgaccgtcaccacctgtga

SEQ ID NO: 282853 - DNA, 25 bp, probe
tcattgaacctgtacagtggatgga

SEQ ID NO: 282854 - DNA, 25 bp, probe
tcataataccagtgtgatgtcaggc

SEQ ID NO: 282855 - DNA, 25 bp, probe
tcatttcacaagactggcttcaggc

SEQ ID NO: 282856 - DNA, 25 bp, probe
tcattgtcaagaagctgccatacct

SEQ ID NO: 282857 - DNA, 25 bp, probe
tcatcattaagtcctgtcatcccta

SEQ ID NO: 282858 - DNA, 25 bp, probe
tcatcatgtggagccccatcatcat

SEQ ID NO: 282859 - DNA, 25 bp, probe
tcattgtcatgatcaccaacatcga

SEQ ID NO: 282860 - DNA, 25 bp, probe
tcattgtcatgatcaccaacatcga

SEQ ID NO: 282861 - DNA, 25 bp, probe
tcattgtcatagatgccatgttgga

SEQ ID NO: 282862 - DNA, 25 bp, probe
tcattgtcatagatgccatgttgga

SEQ ID NO: 282863 - DNA, 25 bp, probe
tcattccatatgcatctgtgtgtgt

SEQ ID NO: 282864 - DNA, 25 bp, probe
tcattacatgtgttctgctcttctc

SEQ ID NO: 282865 - DNA, 25 bp, probe
tcattatcagcatggctccttctgc

SEQ ID NO: 282866 - DNA, 25 bp, probe
tcatattcagcccatcacgctgtgg

SEQ ID NO: 282867 - DNA, 25 bp, probe
tcatcatgctgaccgtcggcatgga

SEQ ID NO: 282868 - DNA, 25 bp, probe
tcatcatgctgaccgtcggcatgga

SEQ ID NO: 282869 - DNA, 25 bp, probe
tcatgctgctgaccactgactcagc

SEQ ID NO: 282870 - DNA, 25 bp, probe
tcatgctgctgaccactgactcagc

SEQ ID NO: 282871 - DNA, 25 bp, probe
tcatggctcatggctcatggctcag

SEQ ID NO: 282872 - DNA, 25 bp, probe
tcattgcctgtgatggcatctggaa

SEQ ID NO: 282873 - DNA, 25 bp, probe
tcattgcctgtgtggcacaatggag

SEQ ID NO: 282874 - DNA, 25 bp, probe
tcattgctcagggagtgaaatgtgc

SEQ ID NO: 282875 - DNA, 25 bp, probe
tcagtgctgcgttgatgtaattgct

SEQ ID NO: 282876 - DNA, 25 bp, probe
tcatctcagctgaagtgtggcttgc

SEQ ID NO: 282877 - DNA, 25 bp, probe
tcatctctgtgccttatgtctatgg

SEQ ID NO: 282878 - DNA, 25 bp, probe
tcatctctgtgccttatgtctatgg

SEQ ID NO: 282879 - DNA, 25 bp, probe
tcatttggtgtattgctaactgaaa

SEQ ID NO: 282880 - DNA, 25 bp, probe
tcatttgatgctaaataggagatac

SEQ ID NO: 282881 - DNA, 25 bp, probe
tcattgtgacttatgaggagcaagc

SEQ ID NO: 282882 - DNA, 25 bp, probe
tcattgtgtttgggaaggcagggaa

SEQ ID NO: 282883 - DNA, 25 bp, probe
tcattgtgtttgggaaggcagggaa

SEQ ID NO: 282884 - DNA, 25 bp, probe
tcattgtttgtggaccagccagggt

SEQ ID NO: 282885 - DNA, 25 bp, probe
tcattgtttgtggaccagccagggt

SEQ ID NO: 282886 - DNA, 25 bp, probe
tcatagttgagtgcacccaagtggc

SEQ ID NO: 282887 - DNA, 25 bp, probe
tcataggtcactggctctccaagtg

SEQ ID NO: 282888 - DNA, 25 bp, probe
tcatacgctccaactgatccagatg

SEQ ID NO: 282889 - DNA, 25 bp, probe
tcatacgctccaactgatccagatg

SEQ ID NO: 282890 - DNA, 25 bp, probe
tcataactccacagatcgaatcaaa

SEQ ID NO: 282891 - DNA, 25 bp, probe
tcatcaatccccttgtcgaaaacta

SEQ ID NO: 282892 - DNA, 25 bp, probe
tcatagacaccatctgatagggaac

SEQ ID NO: 282893 - DNA, 25 bp, probe
tcatctgaaccaacatgctacagta

SEQ ID NO: 282894 - DNA, 25 bp, probe
tcatctgcactgccatacgtggagt

SEQ ID NO: 282895 - DNA, 25 bp, probe
tcacgtcgcgcatcgtgggtggaga

SEQ ID NO: 282896 - DNA, 25 bp, probe
tcaggtcccaacctgcgttcaatgt

SEQ ID NO: 282897 - DNA, 25 bp, probe
tcaaatcaaacagttggattcagaa

SEQ ID NO: 282898 - DNA, 25 bp, probe
tcatagatacaactgttgcagttaa

SEQ ID NO: 282899 - DNA, 25 bp, probe
tcataatacaagcttcctgggaaat

SEQ ID NO: 282900 - DNA, 25 bp, probe
tcatgaactcggccattctcttgga

SEQ ID NO: 282901 - DNA, 25 bp, probe
tcatcatcctccccaatacagatgg

SEQ ID NO: 282902 - DNA, 25 bp, probe
tcatctagctccataattgcaaggg

SEQ ID NO: 282903 - DNA, 25 bp, probe
tcatctagctccataattgcaaggg

SEQ ID NO: 282904 - DNA, 25 bp, probe
tcatcgacccctttgtggaggtgga

SEQ ID NO: 282905 - DNA, 25 bp, probe
tcatctacacccgcatcaggggagg

SEQ ID NO: 282906 - DNA, 25 bp, probe
tcatgaaaaccagatcgtgcacaga

SEQ ID NO: 282907 - DNA, 25 bp, probe
tcatcaaaaccaagtcgcagctgag

SEQ ID NO: 282908 - DNA, 25 bp, probe
tcatataaactcaagtgcctgctac

SEQ ID NO: 282909 - DNA, 25 bp, probe
tcattccaactaatcatcatcttca

SEQ ID NO: 282910 - DNA, 25 bp, probe
tcattccattctattgtttacacaa

SEQ ID NO: 282911 - DNA, 25 bp, probe
tcatttgcttcatatttgctttcaa

SEQ ID NO: 282912 - DNA, 25 bp, probe
tcatttgtctctttttgtatatcat

SEQ ID NO: 282913 - DNA, 25 bp, probe
tcattctgttatacttctgtacaca

SEQ ID NO: 282914 - DNA, 25 bp, probe
tcatattctctgtagcctttgtcaa

SEQ ID NO: 282915 - DNA, 25 bp, probe
tcatcatcttcaccagcgttgggac

SEQ ID NO: 282916 - DNA, 25 bp, probe
tcatctatatcaagccctctgcaaa

SEQ ID NO: 282917 - DNA, 25 bp, probe
tcatctatatcaagccctctgcaaa

SEQ ID NO: 282918 - DNA, 25 bp, probe
tcatccaatctaaccacatcaatat

SEQ ID NO: 282919 - DNA, 25 bp, probe
tcatccatcacttcccattttatgg

SEQ ID NO: 282920 - DNA, 25 bp, probe
tcatcacatcctagccgatgtctct

SEQ ID NO: 282921 - DNA, 25 bp, probe
tcatcacagcaaagtctttgccttc

SEQ ID NO: 282922 - DNA, 25 bp, probe
tcatcaagaaagtcatcatccccgc

SEQ ID NO: 282923 - DNA, 25 bp, probe
tcatcaagaaagtcatcatccccgc

SEQ ID NO: 282924 - DNA, 25 bp, probe
tcatcatagcaataacattcccact

SEQ ID NO: 282925 - DNA, 25 bp, probe
tcatcatgaccagaagcttgacgca

SEQ ID NO: 282926 - DNA, 25 bp, probe
tcattgcacctgcaggcttaggtcc

SEQ ID NO: 282927 - DNA, 25 bp, probe
tcatggccacggtgttggagtccgc

SEQ ID NO: 282928 - DNA, 25 bp, probe
tcaggaaccgggggagtgctgcggc

SEQ ID NO: 282929 - DNA, 25 bp, probe
tcaggttcagggcccgagattgccg

SEQ ID NO: 282930 - DNA, 25 bp, probe
tcatggttcagtcctagcaagaagc

SEQ ID NO: 282931 - DNA, 25 bp, probe
tcaggcccagatcctatgaaaacct

SEQ ID NO: 282932 - DNA, 25 bp, probe
tcattgcctcttctaaaagctactg

SEQ ID NO: 282933 - DNA, 25 bp, probe
tcatgtcagtctgcttagaaataac

SEQ ID NO: 282934 - DNA, 25 bp, probe
tcattcaggctgccctggaagcacc

SEQ ID NO: 282935 - DNA, 25 bp, probe
tcattcaggctgccctggaagcacc

SEQ ID NO: 282936 - DNA, 25 bp, probe
tcattgaggctgcaagagcacaggg

SEQ ID NO: 282937 - DNA, 25 bp, probe
tcatcagagcgccgaggagagtggg

SEQ ID NO: 282938 - DNA, 25 bp, probe
tcatcacgggtgcctggagtgtggt

SEQ ID NO: 282939 - DNA, 25 bp, probe
tcatcacgggtgcctggagtgtggt

SEQ ID NO: 282940 - DNA, 25 bp, probe
tcatcaaggattcctgggtgctcaa

SEQ ID NO: 282941 - DNA, 25 bp, probe
tcatcaagcggtccgaggtggaaga

SEQ ID NO: 282942 - DNA, 25 bp, probe
tcacgcagggacgtgagttggagcg

SEQ ID NO: 282943 - DNA, 25 bp, probe
tcatccggatgctggagttcggcag

SEQ ID NO: 282944 - DNA, 25 bp, probe
tcatccgagatcagcagcaattgcc

SEQ ID NO: 282945 - DNA, 25 bp, probe
tcatcacagagctagtccaggagac

SEQ ID NO: 282946 - DNA, 25 bp, probe
tcatcagacagaagcccgtcgacct

SEQ ID NO: 282947 - DNA, 25 bp, probe
tcatcaagcacaaccggttcacaaa

SEQ ID NO: 282948 - DNA, 25 bp, probe
tcataaggcaatgcatgaaccacag

SEQ ID NO: 282949 - DNA, 25 bp, probe
tcattcgatgagacctgtacccgat

SEQ ID NO: 282950 - DNA, 25 bp, probe
tcattctgcagacacttcccaagtg

SEQ ID NO: 282951 - DNA, 25 bp, probe
tcattcggcatgaagatgtccacaa

SEQ ID NO: 282952 - DNA, 25 bp, probe
tcattcggcatgaagatgtccacaa

SEQ ID NO: 282953 - DNA, 25 bp, probe
tcattcaacagatatccatcatgca

SEQ ID NO: 282954 - DNA, 25 bp, probe
tcatcatcagcaagtttcgccatca

SEQ ID NO: 282955 - DNA, 25 bp, probe
tcatcaccatgttcttcgccatgat

SEQ ID NO: 282956 - DNA, 25 bp, probe
tcagacctgataggattgcctgctt

SEQ ID NO: 282957 - DNA, 25 bp, probe
tcatgaccgacaagggttgtgtgaa

SEQ ID NO: 282958 - DNA, 25 bp, probe
tcatgaagcagacagggtacctgac

SEQ ID NO: 282959 - DNA, 25 bp, probe
tcataatggaccaggatcggcttcc

SEQ ID NO: 282960 - DNA, 25 bp, probe
tcatcaaggcctatggcatccgctt

SEQ ID NO: 282961 - DNA, 25 bp, probe
tcatcaaggcctatggcatccgctt

SEQ ID NO: 282962 - DNA, 25 bp, probe
tcatcaggctccagttattctccat

SEQ ID NO: 282963 - DNA, 25 bp, probe
tcatcaacatacttttagtgaccac

SEQ ID NO: 282964 - DNA, 25 bp, probe
tcatcaaaacgctgctgaggtgccc

SEQ ID NO: 282965 - DNA, 25 bp, probe
tcatctactacagggtgaggtgctt

SEQ ID NO: 282966 - DNA, 25 bp, probe
tcataaccacacggggacttttcca

SEQ ID NO: 282967 - DNA, 25 bp, probe
tcataaccacacggggacttttcca

SEQ ID NO: 282968 - DNA, 25 bp, probe
tcatcaatgccatcgagcaggacta

SEQ ID NO: 282969 - DNA, 25 bp, probe
tcataagccagaccatcaggcagca

SEQ ID NO: 282970 - DNA, 25 bp, probe
tcagtcggcagaccagcatagcact

SEQ ID NO: 282971 - DNA, 25 bp, probe
tcagatgctgcttagaggtaccttc

SEQ ID NO: 282972 - DNA, 25 bp, probe
tcaggatgctaggggctacttctcc

SEQ ID NO: 282973 - DNA, 25 bp, probe
tcaggaatactacgggcttcctcca

SEQ ID NO: 282974 - DNA, 25 bp, probe
tcaggtaacctgcgtgctttataag

SEQ ID NO: 282975 - DNA, 25 bp, probe
tcattgttacgtcacttttctatag

SEQ ID NO: 282976 - DNA, 25 bp, probe
tcattttggttggcgcttttgttgg

SEQ ID NO: 282977 - DNA, 25 bp, probe
tcattttggttttgtattttccagt

SEQ ID NO: 282978 - DNA, 25 bp, probe
tcattttcgttaagaatttggggca

SEQ ID NO: 282979 - DNA, 25 bp, probe
tcattgttcgcttctgtaattctga

SEQ ID NO: 282980 - DNA, 25 bp, probe
tcattcttctcttgctgtaacactt

SEQ ID NO: 282981 - DNA, 25 bp, probe
tcatactttcccgttgacacttgat

SEQ ID NO: 282982 - DNA, 25 bp, probe
tcatcttttaccattgacaccttgc

SEQ ID NO: 282983 - DNA, 25 bp, probe
tcatcttttaccattgacaccttgc

SEQ ID NO: 282984 - DNA, 25 bp, probe
tcatcttctccaacgggaacctgga

SEQ ID NO: 282985 - DNA, 25 bp, probe
tcatctcattcgacacaagtccccg

SEQ ID NO: 282986 - DNA, 25 bp, probe
tcatctcattcgacacaagtccccg

SEQ ID NO: 282987 - DNA, 25 bp, probe
tcatttacctacaagctcccttgga

SEQ ID NO: 282988 - DNA, 25 bp, probe
tcatgttcctcaaaagcacccttga

SEQ ID NO: 282989 - DNA, 25 bp, probe
tcatgttcctcaaaagcacccttga

SEQ ID NO: 282990 - DNA, 25 bp, probe
tcatgaccccaaagaatcacaccaa

SEQ ID NO: 282991 - DNA, 25 bp, probe
tcatatcctcacgtggcaataagcc

SEQ ID NO: 282992 - DNA, 25 bp, probe
tcatactcatcatgtgtaattccgt

SEQ ID NO: 282993 - DNA, 25 bp, probe
tcatttacacagatatccatgcctg

SEQ ID NO: 282994 - DNA, 25 bp, probe
tcagttacctgcataccaactgcct

SEQ ID NO: 282995 - DNA, 25 bp, probe
tcagttcagtcggaacaaagtttcc

SEQ ID NO: 282996 - DNA, 25 bp, probe
tcaggtactcctgaaaggctgtaga

SEQ ID NO: 282997 - DNA, 25 bp, probe
tcaggatccccgtggattctgctaa

SEQ ID NO: 282998 - DNA, 25 bp, probe
tcatggcccctcggatgatttccga

SEQ ID NO: 282999 - DNA, 25 bp, probe
tcatggcccctcggatgatttccga

SEQ ID NO: 283000 - DNA, 25 bp, probe
tcatgagcaccttgctggctaatat

SEQ ID NO: 283001 - DNA, 25 bp, probe
tcatcactgcagcgtggctgatttt

SEQ ID NO: 283002 - DNA, 25 bp, probe
tcatcaccagctagagcttcttccc

SEQ ID NO: 283003 - DNA, 25 bp, probe
tcatcccacatgactgtggtgtcct

SEQ ID NO: 283004 - DNA, 25 bp, probe
tcatcccacatgactgtggtgtcct

SEQ ID NO: 283005 - DNA, 25 bp, probe
tcatccacatcgactttggcttcat

SEQ ID NO: 283006 - DNA, 25 bp, probe
tcatccacatcgactttggcttcat

SEQ ID NO: 283007 - DNA, 25 bp, probe
tcatctttgctgcttcagtgttcat

SEQ ID NO: 283008 - DNA, 25 bp, probe
tcatcaatctggcttcgtgcatgat

SEQ ID NO: 283009 - DNA, 25 bp, probe
tcatcagtatgtcctacgtcatcac

SEQ ID NO: 283010 - DNA, 25 bp, probe
tcatctgcatttggctactgcaaag

SEQ ID NO: 283011 - DNA, 25 bp, probe
tcatctgcattcctgatgaccaatg

SEQ ID NO: 283012 - DNA, 25 bp, probe
tcatctgttcagtcatctccaaaaa

SEQ ID NO: 283013 - DNA, 25 bp, probe
tcatcacttggaccccatacaacat

SEQ ID NO: 283014 - DNA, 25 bp, probe
tcatccttaatcaccttgaagatcc

SEQ ID NO: 283015 - DNA, 25 bp, probe
tcaccatctcaaaacctgacaagac

SEQ ID NO: 283016 - DNA, 25 bp, probe
tcagccccataaactgggatgacct

SEQ ID NO: 283017 - DNA, 25 bp, probe
tcagccccataaactgggatgacct

SEQ ID NO: 283018 - DNA, 25 bp, probe
tcatcgcccagacagtgctgcgaaa

SEQ ID NO: 283019 - DNA, 25 bp, probe
tcatccacacaagtctggccgaatt

SEQ ID NO: 283020 - DNA, 25 bp, probe
tcatatcctcagaccaggtggaatt

SEQ ID NO: 283021 - DNA, 25 bp, probe
tcatagagctagaccagctgctgtg

SEQ ID NO: 283022 - DNA, 25 bp, probe
tcatatagttcaaccatgattgatg

SEQ ID NO: 283023 - DNA, 25 bp, probe
tcatctggattgtctcctgcattat

SEQ ID NO: 283024 - DNA, 25 bp, probe
tcatcatcattttctcctatgtgct

SEQ ID NO: 283025 - DNA, 25 bp, probe
tcatcatcattttctcctatgtgct

SEQ ID NO: 283026 - DNA, 25 bp, probe
tcatgtctgattctgctgctaatta

SEQ ID NO: 283027 - DNA, 25 bp, probe
tcatgtctttgctgcagaactgaag

SEQ ID NO: 283028 - DNA, 25 bp, probe
tcattttctgccgatgaagaatttg

SEQ ID NO: 283029 - DNA, 25 bp, probe
tcatgctttgctccgaacaaatagt

SEQ ID NO: 283030 - DNA, 25 bp, probe
tcagtttcctcatctgcaaaatggg

SEQ ID NO: 283031 - DNA, 25 bp, probe
tcatttctcttccagctgctaaaag

SEQ ID NO: 283032 - DNA, 25 bp, probe
tcatctttccatcaggccaaagaat

SEQ ID NO: 283033 - DNA, 25 bp, probe
tcatctttccataatgaaaactgag

SEQ ID NO: 283034 - DNA, 25 bp, probe
tcatcttgatcctagggaagaaggc

SEQ ID NO: 283035 - DNA, 25 bp, probe
tcatcttgatcctagggaagaaggc

SEQ ID NO: 283036 - DNA, 25 bp, probe
tcatctacagcctgaggaacaagga

SEQ ID NO: 283037 - DNA, 25 bp, probe
tcattaccctcttgtggaagaagat

SEQ ID NO: 283038 - DNA, 25 bp, probe
tcattaccaccaatctgtgaaagta

SEQ ID NO: 283039 - DNA, 25 bp, probe
tcattcaccgcgatcttaaatgtga

SEQ ID NO: 283040 - DNA, 25 bp, probe
tcatgaacacggctctagataagga

SEQ ID NO: 283041 - DNA, 25 bp, probe
tcatgaacacggctctagataagga

SEQ ID NO: 283042 - DNA, 25 bp, probe
tcatgaaccagacgtaccgagagga

SEQ ID NO: 283043 - DNA, 25 bp, probe
tcatacacacacaaggacctggatt

SEQ ID NO: 283044 - DNA, 25 bp, probe
tcatacacacacaaggacctggatt

SEQ ID NO: 283045 - DNA, 25 bp, probe
tcatcaagcgctacgagacgctgga

SEQ ID NO: 283046 - DNA, 25 bp, probe
tcagcaatcagctcaatacagtgca

SEQ ID NO: 283047 - DNA, 25 bp, probe
tcagcaatcagctcaatacagtgca

SEQ ID NO: 283048 - DNA, 25 bp, probe
tcatcgtcatctggatcatcctggc

SEQ ID NO: 283049 - DNA, 25 bp, probe
tcatcgacagtgaatacacggccca

SEQ ID NO: 283050 - DNA, 25 bp, probe
tcatcaccattggcaatgagcggtt

SEQ ID NO: 283051 - DNA, 25 bp, probe
tcatgcacaaacgagctcagaggct

SEQ ID NO: 283052 - DNA, 25 bp, probe
tcatgagcgagaccgtcaacagtgt

SEQ ID NO: 283053 - DNA, 25 bp, probe
taatctatgatccagccaaacgaat

SEQ ID NO: 283054 - DNA, 25 bp, probe
tcatttatgctcggccaaaggcact

SEQ ID NO: 283055 - DNA, 25 bp, probe
tcatcctactccctgaagagcgcaa

SEQ ID NO: 283056 - DNA, 25 bp, probe
tcatcctactccctgaagagcgcaa

SEQ ID NO: 283057 - DNA, 25 bp, probe
tcatccataccaaggagacgctgac

SEQ ID NO: 283058 - DNA, 25 bp, probe
tcatccataccaaggagacgctgac

SEQ ID NO: 283059 - DNA, 25 bp, probe
tcaccagaaaaggagaactgcgaca

SEQ ID NO: 283060 - DNA, 25 bp, probe
taagccagaaagggcaacccagaaa

SEQ ID NO: 283061 - DNA, 25 bp, probe
tacggagaaatggaaccccgacaat

SEQ ID NO: 283062 - DNA, 25 bp, probe
tcagggagaactgcttcccctggca

SEQ ID NO: 283063 - DNA, 25 bp, probe
tcaggaaaccccttcatactgtgta

SEQ ID NO: 283064 - DNA, 25 bp, probe
tcaggaaaacccattggcagatatt

SEQ ID NO: 283065 - DNA, 25 bp, probe
tcatggggaactccatttcagcagc

SEQ ID NO: 283066 - DNA, 25 bp, probe
tcatggggaagcttccatgatgcac

SEQ ID NO: 283067 - DNA, 25 bp, probe
tcatgggtgacatctacctgctgct

SEQ ID NO: 283068 - DNA, 25 bp, probe
tcatcggtgcctggtactctggcaa

SEQ ID NO: 283069 - DNA, 25 bp, probe
tcatcaggagcctgtactgcctgaa

SEQ ID NO: 283070 - DNA, 25 bp, probe
tcatctgctactcgggaatcctaaa

SEQ ID NO: 283071 - DNA, 25 bp, probe
tcatcctgtgctcggaaatcccaaa

SEQ ID NO: 283072 - DNA, 25 bp, probe
tcatgccaggcaaggtgaaccctac

SEQ ID NO: 283073 - DNA, 25 bp, probe
tcatccagcgctgctggagacccag

SEQ ID NO: 283074 - DNA, 25 bp, probe
tcatgatccaggacgccagaaccag

SEQ ID NO: 283075 - DNA, 25 bp, probe
tcatgatccaggacgccagaaccag

SEQ ID NO: 283076 - DNA, 25 bp, probe
tcagcaacaggagccggacctacga

SEQ ID NO: 283077 - DNA, 25 bp, probe
tcagaaagggcccaggctttgactg

SEQ ID NO: 283078 - DNA, 25 bp, probe
tcaaaacggcgccgaacatgttgct

SEQ ID NO: 283079 - DNA, 25 bp, probe
tcataaagagaccggccagattgtt

SEQ ID NO: 283080 - DNA, 25 bp, probe
tcataattaatgcccttcagattgt

SEQ ID NO: 283081 - DNA, 25 bp, probe
tcatatattccttcctatacattgt

SEQ ID NO: 283082 - DNA, 25 bp, probe
tcatgaactccttcgtcaacgacat

SEQ ID NO: 283083 - DNA, 25 bp, probe
tcagaagctgctgtggtgctgacgg

SEQ ID NO: 283084 - DNA, 25 bp, probe
tcagaatgtctggtcctggcttggg

SEQ ID NO: 283085 - DNA, 25 bp, probe
tcagttgttagtgtgtcttagtgtg

SEQ ID NO: 283086 - DNA, 25 bp, probe
tcagttcttggtgagttctccagtg

SEQ ID NO: 283087 - DNA, 25 bp, probe
tcagtccttcttggaagactacttc

SEQ ID NO: 283088 - DNA, 25 bp, probe
tcagtccttcttggaagactacttc

SEQ ID NO: 283089 - DNA, 25 bp, probe
tacgcctttctagatgacaacttcc

SEQ ID NO: 283090 - DNA, 25 bp, probe
tcatgggttccttgcttgagacctt

SEQ ID NO: 283091 - DNA, 25 bp, probe
tcatgcgatgtgtccaatcggagac

SEQ ID NO: 283092 - DNA, 25 bp, probe
tcagcgaggagccataatgtgcata

SEQ ID NO: 283093 - DNA, 25 bp, probe
tcatctgagtgacggatatgtgaaa

SEQ ID NO: 283094 - DNA, 25 bp, probe
tcaggagtaagatgtgtgagcgcac

SEQ ID NO: 283095 - DNA, 25 bp, probe
tcagtgacagaagcatgtttgagat

SEQ ID NO: 283096 - DNA, 25 bp, probe
tcatgtgaccactctgtcttgtgtt

SEQ ID NO: 283097 - DNA, 25 bp, probe
tcatgatgtacatccttctggtctt

SEQ ID NO: 283098 - DNA, 25 bp, probe
tcatgatgtacatccttctggtctt

SEQ ID NO: 283099 - DNA, 25 bp, probe
tcatgttcacatgtcctgaggtctc

SEQ ID NO: 283100 - DNA, 25 bp, probe
tcatttcatctactacagggtgagg

SEQ ID NO: 283101 - DNA, 25 bp, probe
tcatgtctgctttctaagtgggaag

SEQ ID NO: 283102 - DNA, 25 bp, probe
tcatgtctgctttctaagtgggaag

SEQ ID NO: 283103 - DNA, 25 bp, probe
tcatgttgccatttaatgcatggat

SEQ ID NO: 283104 - DNA, 25 bp, probe
tcatctggcctggataatctcactg

SEQ ID NO: 283105 - DNA, 25 bp, probe
tcatgagtgactgctggatctacaa

SEQ ID NO: 283106 - DNA, 25 bp, probe
tcatgctggactgcaggcacaaaga

SEQ ID NO: 283107 - DNA, 25 bp, probe
tcatctggacagaggcctacatgga

SEQ ID NO: 283108 - DNA, 25 bp, probe
tcatcggcacagctgtggccaggta

SEQ ID NO: 283109 - DNA, 25 bp, probe
tcatcggcacagctgtggccaggta

SEQ ID NO: 283110 - DNA, 25 bp, probe
tcatcggcagaggagtgagctctgt

SEQ ID NO: 283111 - DNA, 25 bp, probe
tcataaaaggtgacccttctgtctg

SEQ ID NO: 283112 - DNA, 25 bp, probe
tcataaaaggtgacccttctgtctg

SEQ ID NO: 283113 - DNA, 25 bp, probe
tcatcaaacagtcggcctatgactc

SEQ ID NO: 283114 - DNA, 25 bp, probe
tcatctacacagtgactttcttcct

SEQ ID NO: 283115 - DNA, 25 bp, probe
tcatcttcacagagacccagttcac

SEQ ID NO: 283116 - DNA, 25 bp, probe
tcatgttcaaatgttcacaaccaca

SEQ ID NO: 283117 - DNA, 25 bp, probe
tcatcattagcaactttatatacac

SEQ ID NO: 283118 - DNA, 25 bp, probe
tcatcattgactgctctttgctcat

SEQ ID NO: 283119 - DNA, 25 bp, probe
tcatcatctactgctacatcttcat

SEQ ID NO: 283120 - DNA, 25 bp, probe
tcatcatccacatcttcatcgtgtt

SEQ ID NO: 283121 - DNA, 25 bp, probe
tcatatgtaataattctcactgttt

SEQ ID NO: 283122 - DNA, 25 bp, probe
tcatatgtaataattctcactgttt

SEQ ID NO: 283123 - DNA, 25 bp, probe
tcagggacaaatagctcgatttttt

SEQ ID NO: 283124 - DNA, 25 bp, probe
tcagggacaattactggggacaatt

SEQ ID NO: 283125 - DNA, 25 bp, probe
tcatggtgcactttatttatggtac

SEQ ID NO: 283126 - DNA, 25 bp, probe
tcatgggactgaatatacctggggt

SEQ ID NO: 283127 - DNA, 25 bp, probe
tcatgggactgaatatacctggggt

SEQ ID NO: 283128 - DNA, 25 bp, probe
tcatgagttctgctgaatgccgcga

SEQ ID NO: 283129 - DNA, 25 bp, probe
tcatggtcttcggcatcatgctgca

SEQ ID NO: 283130 - DNA, 25 bp, probe
tcatgatctttggcctactgcaggc

SEQ ID NO: 283131 - DNA, 25 bp, probe
tcagttatggcttctacggctgcca

SEQ ID NO: 283132 - DNA, 25 bp, probe
tagttagtgccatggcacactgcca

SEQ ID NO: 283133 - DNA, 25 bp, probe
tcaggtttcagatggagctctgcga

SEQ ID NO: 283134 - DNA, 25 bp, probe
tcaggtctcatgaatgtaagcccga

SEQ ID NO: 283135 - DNA, 25 bp, probe
tcatggtcatagctgtttcctgtga

SEQ ID NO: 283136 - DNA, 25 bp, probe
tcacgtatggttctttctgtgggtc

SEQ ID NO: 283137 - DNA, 25 bp, probe
tcacgtatggttctttctgtgggtc

SEQ ID NO: 283138 - DNA, 25 bp, probe
tcaggtctgttcctgttactgttgg

SEQ ID NO: 283139 - DNA, 25 bp, probe
tcaggaggtgaccagtcttcatttg

SEQ ID NO: 283140 - DNA, 25 bp, probe
tcatcgtggtgtccatgatcttcat

SEQ ID NO: 283141 - DNA, 25 bp, probe
tcatcgtggtgtccatgatcttcat

SEQ ID NO: 283142 - DNA, 25 bp, probe
tcatcggggtcattatcaactggga

SEQ ID NO: 283143 - DNA, 25 bp, probe
tcatcaccgagttcattgagaatgg

SEQ ID NO: 283144 - DNA, 25 bp, probe
tcatcacggagttcatggccaaagg

SEQ ID NO: 283145 - DNA, 25 bp, probe
tcatgggggatttggcacaaaatgg

SEQ ID NO: 283146 - DNA, 25 bp, probe
tcaggaggctggaggcaaacatgct

SEQ ID NO: 283147 - DNA, 25 bp, probe
tcagtatccgagagctgacacaccc

SEQ ID NO: 283148 - DNA, 25 bp, probe
tcatgtactttgagttccctcagcc

SEQ ID NO: 283149 - DNA, 25 bp, probe
tcatgtacttttcattcattgattc

SEQ ID NO: 283150 - DNA, 25 bp, probe
tcaggaatcttaacttcatgtgagc

SEQ ID NO: 283151 - DNA, 25 bp, probe
tcatccccttcaattttgtggccaa

SEQ ID NO: 283152 - DNA, 25 bp, probe
tcatccccttcaattttgtggccaa

SEQ ID NO: 283153 - DNA, 25 bp, probe
tcatccagctttttttgttagcaaa

SEQ ID NO: 283154 - DNA, 25 bp, probe
tcatccagtttcagttgtcctgtca

SEQ ID NO: 283155 - DNA, 25 bp, probe
tcataccatttgggttgcttctgct

SEQ ID NO: 283156 - DNA, 25 bp, probe
tcatccaagtctggcgtgtgtttgt

SEQ ID NO: 283157 - DNA, 25 bp, probe
tcatccaagtctggcgtgtgtttgt

SEQ ID NO: 283158 - DNA, 25 bp, probe
tcatcccatgtcgtgttggttacta

SEQ ID NO: 283159 - DNA, 25 bp, probe
tcatccctgcaaggatctgcagtta

SEQ ID NO: 283160 - DNA, 25 bp, probe
tcatcctccaggaactgcaggtcaa

SEQ ID NO: 283161 - DNA, 25 bp, probe
tcatcctcacgtgttcggtactgag

SEQ ID NO: 283162 - DNA, 25 bp, probe
tcatcctcacgtgttcggtactgag

SEQ ID NO: 283163 - DNA, 25 bp, probe
tcacctccagtgactcaaattacta

SEQ ID NO: 283164 - DNA, 25 bp, probe
tcatccatcgcgatgtcaaaccctc

SEQ ID NO: 283165 - DNA, 25 bp, probe
tcatcatccagtccttggataacct

SEQ ID NO: 283166 - DNA, 25 bp, probe
tcatcctgcaagccttgttgctacc

SEQ ID NO: 283167 - DNA, 25 bp, probe
tcatctggctggcattgttgcccat

SEQ ID NO: 283168 - DNA, 25 bp, probe
tcatgggagctcttttctgatccat

SEQ ID NO: 283169 - DNA, 25 bp, probe
tcaggaatgtgattcttcatcttcc

SEQ ID NO: 283170 - DNA, 25 bp, probe
tcatgtgcaatttttatctaaccaa

SEQ ID NO: 283171 - DNA, 25 bp, probe
tcatctgcactgttgtggtctaatc

SEQ ID NO: 283172 - DNA, 25 bp, probe
tcatctgcactgttgtggtctaatc

SEQ ID NO: 283173 - DNA, 25 bp, probe
tcatcgacttcattggccaagtgca

SEQ ID NO: 283174 - DNA, 25 bp, probe
tcatggccttcatcgagcagggcaa

SEQ ID NO: 283175 - DNA, 25 bp, probe
tcatcagcatctgcacaaaggtgga

SEQ ID NO: 283176 - DNA, 25 bp, probe
tcatcagcctggagaaggaggagca

SEQ ID NO: 283177 - DNA, 25 bp, probe
tcatccctgagctgaacgggaagct

SEQ ID NO: 283178 - DNA, 25 bp, probe
tcatcgccgagatggtcggggtgct

SEQ ID NO: 283179 - DNA, 25 bp, probe
tcatcgccgagatggtcggggtgct

SEQ ID NO: 283180 - DNA, 25 bp, probe
tcatcgtcatagaggctggcggagt

SEQ ID NO: 283181 - DNA, 25 bp, probe
tcatcggcaggaagctgtggcggag

SEQ ID NO: 283182 - DNA, 25 bp, probe
tcactggcatggtggttgggaccca

SEQ ID NO: 283183 - DNA, 25 bp, probe
tcatgcgcctggtggggaagacgcc

SEQ ID NO: 283184 - DNA, 25 bp, probe
tcatcgtcatggttctgcttcaaga

SEQ ID NO: 283185 - DNA, 25 bp, probe
tcatcgtcatggttctgcttcaaga

SEQ ID NO: 283186 - DNA, 25 bp, probe
tcatcgacatggtcctgaaccgcat

SEQ ID NO: 283187 - DNA, 25 bp, probe
tcatcgacatggtcctgaaccgcat

SEQ ID NO: 283188 - DNA, 25 bp, probe
tcaggactatgacctcaggcactct

SEQ ID NO: 283189 - DNA, 25 bp, probe
tcaggatcttgattttgacatctct

SEQ ID NO: 283190 - DNA, 25 bp, probe
tcatgtgtttcatttatcccatata

SEQ ID NO: 283191 - DNA, 25 bp, probe
tcatgctgtgtgactcaaaccaaat

SEQ ID NO: 283192 - DNA, 25 bp, probe
tcagtgtgcataaaacaccaaattc

SEQ ID NO: 283193 - DNA, 25 bp, probe
tcagtgtcctaaatggccaaatcca

SEQ ID NO: 283194 - DNA, 25 bp, probe
tcaggtgaccaggggtagccctcag

SEQ ID NO: 283195 - DNA, 25 bp, probe
tcaggggctcacaaggtaccattat

SEQ ID NO: 283196 - DNA, 25 bp, probe
tcagtgggccacagagctaaatgta

SEQ ID NO: 283197 - DNA, 25 bp, probe
tcagggagtgtcacctcaaatgcaa

SEQ ID NO: 283198 - DNA, 25 bp, probe
tcatggtacgtttcctaaagatagg

SEQ ID NO: 283199 - DNA, 25 bp, probe
taattccggtcagtgctgacaaata

SEQ ID NO: 283200 - DNA, 25 bp, probe
tcacattcggtctacttgcagggta

SEQ ID NO: 283201 - DNA, 25 bp, probe
tcacttctggtgccacaactgttta

SEQ ID NO: 283202 - DNA, 25 bp, probe
tcatcttcaaagcacaactctattt

SEQ ID NO: 283203 - DNA, 25 bp, probe
tcacttaacttctaagttattttca

SEQ ID NO: 283204 - DNA, 25 bp, probe
tcacttaggtattcgtttttctgtt

SEQ ID NO: 283205 - DNA, 25 bp, probe
tcacttaggtattcgtttttctgtt

SEQ ID NO: 283206 - DNA, 25 bp, probe
tcacttggggtttgtacatttttgg

SEQ ID NO: 283207 - DNA, 25 bp, probe
tcatctttgaggtgtaatcttgttt

SEQ ID NO: 283208 - DNA, 25 bp, probe
tcactttgaattagttgtattcctt

SEQ ID NO: 283209 - DNA, 25 bp, probe
tcagttcttactacttctgtcgcac

SEQ ID NO: 283210 - DNA, 25 bp, probe
tcatgttttgcagagttttgccaaa

SEQ ID NO: 283211 - DNA, 25 bp, probe
tcagattgttgtatttattccacta

SEQ ID NO: 283212 - DNA, 25 bp, probe
tcagtgttttggactccatctctca

SEQ ID NO: 283213 - DNA, 25 bp, probe
tcagttgacactgagctcctttcat

SEQ ID NO: 283214 - DNA, 25 bp, probe
tcagtatgaacctgtcctaaatcaa

SEQ ID NO: 283215 - DNA, 25 bp, probe
tcagttcccctagctgtaaaacagg

SEQ ID NO: 283216 - DNA, 25 bp, probe
tacccaccccgtgtgacagaatagg

SEQ ID NO: 283217 - DNA, 25 bp, probe
tcaaacaccccgaggtgaaaagtgc

SEQ ID NO: 283218 - DNA, 25 bp, probe
tcagatacacccggactcggatcaa

SEQ ID NO: 283219 - DNA, 25 bp, probe
tcagttactcttaattctttataaa

SEQ ID NO: 283220 - DNA, 25 bp, probe
tcagttactcttaattctttataaa

SEQ ID NO: 283221 - DNA, 25 bp, probe
tcacttacttcttttcattttgcaa

SEQ ID NO: 283222 - DNA, 25 bp, probe
tcaccattcttatgtcactttagaa

SEQ ID NO: 283223 - DNA, 25 bp, probe
tcactcatttatcttaattctagga

SEQ ID NO: 283224 - DNA, 25 bp, probe
tcactcatttatcttaattctagga

SEQ ID NO: 283225 - DNA, 25 bp, probe
tcacctttgaccgtacaggtacaga

SEQ ID NO: 283226 - DNA, 25 bp, probe
tcacctgtgggctgtccaagtgacc

SEQ ID NO: 283227 - DNA, 25 bp, probe
tcatcgtgttggctgtgctcaactc

SEQ ID NO: 283228 - DNA, 25 bp, probe
tcatcgtgttggctgtgctcaactc

SEQ ID NO: 283229 - DNA, 25 bp, probe
tcatcaggtttccatgggcatgaag

SEQ ID NO: 283230 - DNA, 25 bp, probe
tcatgcggtttccaaggtgcacatt

SEQ ID NO: 283231 - DNA, 25 bp, probe
tcagaggacttggcaagggccgcac

SEQ ID NO: 283232 - DNA, 25 bp, probe
tcaggaaatatcgacagggctacac

SEQ ID NO: 283233 - DNA, 25 bp, probe
tcagcaaaaatcttatggcctcaac

SEQ ID NO: 283234 - DNA, 25 bp, probe
tcagcaaaaatgactcagggccaag

SEQ ID NO: 283235 - DNA, 25 bp, probe
tcagcggccatatttccggccaagc

SEQ ID NO: 283236 - DNA, 25 bp, probe
tcaggatgctcttatgtccttccag

SEQ ID NO: 283237 - DNA, 25 bp, probe
tcatgagtgctcagagtccctgcta

SEQ ID NO: 283238 - DNA, 25 bp, probe
tcatcaggcctgcagatctcagcct

SEQ ID NO: 283239 - DNA, 25 bp, probe
tcatcatggcaacaggccaggccct

SEQ ID NO: 283240 - DNA, 25 bp, probe
tcatctgtcgctaaggcgcaacctc

SEQ ID NO: 283241 - DNA, 25 bp, probe
tcatctgtcgctaaggcgcaacctc

SEQ ID NO: 283242 - DNA, 25 bp, probe
tcatcagcgcgcaagagggcagacc

SEQ ID NO: 283243 - DNA, 25 bp, probe
tcatctcacgctgatcattggatcc

SEQ ID NO: 283244 - DNA, 25 bp, probe
tcatctccactgaatcgctggactg

SEQ ID NO: 283245 - DNA, 25 bp, probe
tcatctagcagacagctctggacag

SEQ ID NO: 283246 - DNA, 25 bp, probe
tcatccagcaaatcccaagcagcaa

SEQ ID NO: 283247 - DNA, 25 bp, probe
tcatctacaacttcctcagtggcaa

SEQ ID NO: 283248 - DNA, 25 bp, probe
tcatcttcataataccagtgtgatg

SEQ ID NO: 283249 - DNA, 25 bp, probe
tcatcctcataatgtcagagtgagc

SEQ ID NO: 283250 - DNA, 25 bp, probe
tcatccataagatgcccctgggcta

SEQ ID NO: 283251 - DNA, 25 bp, probe
tcatcgataaagccaagctctccag

SEQ ID NO: 283252 - DNA, 25 bp, probe
tcatgccatcaggggaactctgtag

SEQ ID NO: 283253 - DNA, 25 bp, probe
tcatgtcaggcgttaaactgtcagt

SEQ ID NO: 283254 - DNA, 25 bp, probe
tcatgtcagactgtacccatccagc

SEQ ID NO: 283255 - DNA, 25 bp, probe
tcatgtcagactgtacccatccagc

SEQ ID NO: 283256 - DNA, 25 bp, probe
tcatgtagctcagctatggcacccc

SEQ ID NO: 283257 - DNA, 25 bp, probe
tcatgtagctcagctatggcacccc

SEQ ID NO: 283258 - DNA, 25 bp, probe
tcaggagcactggctgtggacgttc

SEQ ID NO: 283259 - DNA, 25 bp, probe
tcaggacattctggattattgttcc

SEQ ID NO: 283260 - DNA, 25 bp, probe
tcatgtgagctattggagttttcct

SEQ ID NO: 283261 - DNA, 25 bp, probe
tcagtgagctcatgaggttttcatt

SEQ ID NO: 283262 - DNA, 25 bp, probe
tcatgtacctggcagtgggtatctt

SEQ ID NO: 283263 - DNA, 25 bp, probe
tcagtcctagcaagaagcgagaatt

SEQ ID NO: 283264 - DNA, 25 bp, probe
tcagtcctactccaggccaaatagg

SEQ ID NO: 283265 - DNA, 25 bp, probe
tcagtcagtatctgcagaacagtaa

SEQ ID NO: 283266 - DNA, 25 bp, probe
tcatgtttgatttagatgacattca

SEQ ID NO: 283267 - DNA, 25 bp, probe
tcatgtttgatttagatgacattca

SEQ ID NO: 283268 - DNA, 25 bp, probe
tcatcattgtttctgcatgaatatc

SEQ ID NO: 283269 - DNA, 25 bp, probe
tcatcttgtttgctcaagtctttct

SEQ ID NO: 283270 - DNA, 25 bp, probe
tcatcttgtttgctcaagtctttct

SEQ ID NO: 283271 - DNA, 25 bp, probe
tcatgattgttttccataccttgcc

SEQ ID NO: 283272 - DNA, 25 bp, probe
tcatctattccttatcaaccaactc

SEQ ID NO: 283273 - DNA, 25 bp, probe
tcatcgttgccaacacaatgcccac

SEQ ID NO: 283274 - DNA, 25 bp, probe
tcatcgttgccaacacaatgcccac

SEQ ID NO: 283275 - DNA, 25 bp, probe
tcatctgattccagagcactgctcc

SEQ ID NO: 283276 - DNA, 25 bp, probe
tcatgtatgtgcgtcctgcatctgg

SEQ ID NO: 283277 - DNA, 25 bp, probe
tcatgtatgtgcgtcctgcatctgg

SEQ ID NO: 283278 - DNA, 25 bp, probe
tcatgtttgcgctcatgcttcagct

SEQ ID NO: 283279 - DNA, 25 bp, probe
tcatgtttgcgctcatgcttcagct

SEQ ID NO: 283280 - DNA, 25 bp, probe
tcagtattggcgtctctccaagtcg

SEQ ID NO: 283281 - DNA, 25 bp, probe
tcatcttctgggtcctgccagaggg

SEQ ID NO: 283282 - DNA, 25 bp, probe
tcatcttctgggtcctgccagaggg

SEQ ID NO: 283283 - DNA, 25 bp, probe
tcatgacttagagtcctgccgtggc

SEQ ID NO: 283284 - DNA, 25 bp, probe
tcatgtcttaccagtgacgctgctg

SEQ ID NO: 283285 - DNA, 25 bp, probe
tcatgctctctaccaactaccatga

SEQ ID NO: 283286 - DNA, 25 bp, probe
tcatccacgaagaatctgcaccagt

SEQ ID NO: 283287 - DNA, 25 bp, probe
tcatcctctgacatacatgaccctc

SEQ ID NO: 283288 - DNA, 25 bp, probe
tcatctcattaaggccattcccact

SEQ ID NO: 283289 - DNA, 25 bp, probe
tcactgttgaatgcctgtcccagtc

SEQ ID NO: 283290 - DNA, 25 bp, probe
tcagtgattgaaactcataccccat

SEQ ID NO: 283291 - DNA, 25 bp, probe
tcatctaatttaatattcctggcat

SEQ ID NO: 283292 - DNA, 25 bp, probe
tcatctcactttaatgctttcttgc

SEQ ID NO: 283293 - DNA, 25 bp, probe
tcatgcatccatacttctgtttttg

SEQ ID NO: 283294 - DNA, 25 bp, probe
tcatgcatccatacttctgtttttg

SEQ ID NO: 283295 - DNA, 25 bp, probe
tcatctccatcctttttgttatatg

SEQ ID NO: 283296 - DNA, 25 bp, probe
tcatctccatcctttttgttatatg

SEQ ID NO: 283297 - DNA, 25 bp, probe
tcatcatcctctttatcttgtattt

SEQ ID NO: 283298 - DNA, 25 bp, probe
tcatgtgacttacttgcttgtattt

SEQ ID NO: 283299 - DNA, 25 bp, probe
tcactgatccttctgcatatttaaa

SEQ ID NO: 283300 - DNA, 25 bp, probe
tcatctgcccaacctgcaatgtgac

SEQ ID NO: 283301 - DNA, 25 bp, probe
tcatggcctatgaccgctatgtggc

SEQ ID NO: 283302 - DNA, 25 bp, probe
tcatgttctttcagcttatggcatt

SEQ ID NO: 283303 - DNA, 25 bp, probe
tcatgttctttcagcttatggcatt

SEQ ID NO: 283304 - DNA, 25 bp, probe
tcatgtttttctccacaatgaaaag

SEQ ID NO: 283305 - DNA, 25 bp, probe
tcaggttttctctagagcaaaacgg

SEQ ID NO: 283306 - DNA, 25 bp, probe
tcaggttctcccaaagatgacatca

SEQ ID NO: 283307 - DNA, 25 bp, probe
tcagtgttccccaagaggatggcca

SEQ ID NO: 283308 - DNA, 25 bp, probe
tcagtcttctgaactccagggacca

SEQ ID NO: 283309 - DNA, 25 bp, probe
tcagtcatcctgaacctgagttcaa

SEQ ID NO: 283310 - DNA, 25 bp, probe
tcaggccatctggaccagatgttga

SEQ ID NO: 283311 - DNA, 25 bp, probe
tcaggccatcatggaacaaactgtc

SEQ ID NO: 283312 - DNA, 25 bp, probe
tcaggcatgcgagtaacaagggcat

SEQ ID NO: 283313 - DNA, 25 bp, probe
tcatgacatctgactacccagtggt

SEQ ID NO: 283314 - DNA, 25 bp, probe
tcatggtctgcacatccactgtgct

SEQ ID NO: 283315 - DNA, 25 bp, probe
tcatggtctgcacatccactgtgct

SEQ ID NO: 283316 - DNA, 25 bp, probe
tcatgtgtgctgcagtcttcttcat

SEQ ID NO: 283317 - DNA, 25 bp, probe
tcatgtggtaggttctttctcagga

SEQ ID NO: 283318 - DNA, 25 bp, probe
tcatggagcacaggttcttcctcag

SEQ ID NO: 283319 - DNA, 25 bp, probe
tcatggagcacaggttcttcctcag

SEQ ID NO: 283320 - DNA, 25 bp, probe
tcatggagcacaggttcttcctcag

SEQ ID NO: 283321 - DNA, 25 bp, probe
tcatgaactcagcctttgtctcaac

SEQ ID NO: 283322 - DNA, 25 bp, probe
tcatggcagctacccatgctgtcta

SEQ ID NO: 283323 - DNA, 25 bp, probe
tcatggagccacgtgagctgatcgt

SEQ ID NO: 283324 - DNA, 25 bp, probe
tcatgctgcacctgtacgtgcgcat

SEQ ID NO: 283325 - DNA, 25 bp, probe
tcatgctacagctgacgagcgccat

SEQ ID NO: 283326 - DNA, 25 bp, probe
tcatccatctgctggcagagagcca

SEQ ID NO: 283327 - DNA, 25 bp, probe
tcatccatctcagcatcaacacaat

SEQ ID NO: 283328 - DNA, 25 bp, probe
tcatccacactgccacaatgcaggt

SEQ ID NO: 283329 - DNA, 25 bp, probe
tcatcgtgttctgcaatgcaggcat

SEQ ID NO: 283330 - DNA, 25 bp, probe
tcatctctgttcatcattgactgct

SEQ ID NO: 283331 - DNA, 25 bp, probe
tcatcttgtacactatagcttcttc

SEQ ID NO: 283332 - DNA, 25 bp, probe
tcatcttgtacactatagcttcttc

SEQ ID NO: 283333 - DNA, 25 bp, probe
tcatctctgttatacacctgtatca

SEQ ID NO: 283334 - DNA, 25 bp, probe
tcatgctgtgtgtcggacacctgga

SEQ ID NO: 283335 - DNA, 25 bp, probe
tcatgtatgtggtgaccgtgctggg

SEQ ID NO: 283336 - DNA, 25 bp, probe
tcatgtttgagatgctcacggggtc

SEQ ID NO: 283337 - DNA, 25 bp, probe
tcatgttggcagaactcaagggcaa

SEQ ID NO: 283338 - DNA, 25 bp, probe
tcagtgggctgtttgctagaataaa

SEQ ID NO: 283339 - DNA, 25 bp, probe
tcagtgggctgcagttgcccaacca

SEQ ID NO: 283340 - DNA, 25 bp, probe
tcagtgggcagaactttcccaagcc

SEQ ID NO: 283341 - DNA, 25 bp, probe
tcagagaggcagattccttcccctc

SEQ ID NO: 283342 - DNA, 25 bp, probe
tcagagaggcagattccttcccctc

SEQ ID NO: 283343 - DNA, 25 bp, probe
tcatggtggcacagttttccacacc

SEQ ID NO: 283344 - DNA, 25 bp, probe
tcatggtggccatgggatttcaggc

SEQ ID NO: 283345 - DNA, 25 bp, probe
tcatggtggccatgggatttcaggc

SEQ ID NO: 283346 - DNA, 25 bp, probe
tcatgtctagaatgggcatcttcaa

SEQ ID NO: 283347 - DNA, 25 bp, probe
tcatgcttatgttggctgtgctcat

SEQ ID NO: 283348 - DNA, 25 bp, probe
tcagtttgcattggcttctcatttc

SEQ ID NO: 283349 - DNA, 25 bp, probe
tcatgtttaatggcacctcatttgg

SEQ ID NO: 283350 - DNA, 25 bp, probe
tcatgtttaatggcacctcatttgg

SEQ ID NO: 283351 - DNA, 25 bp, probe
tcatgaccaaatccacgctcaatta

SEQ ID NO: 283352 - DNA, 25 bp, probe
tcatgatggaacacccccatttact

SEQ ID NO: 283353 - DNA, 25 bp, probe
tcatggggactcctacccatttgat

SEQ ID NO: 283354 - DNA, 25 bp, probe
tcatggccgtgctggaagcctttgt

SEQ ID NO: 283355 - DNA, 25 bp, probe
tcaggcggagttggtacttttgcta

SEQ ID NO: 283356 - DNA, 25 bp, probe
tcagaggtgcagtgagttcccttgt

SEQ ID NO: 283357 - DNA, 25 bp, probe
tcagtgtgtgatccggtttcttttt

SEQ ID NO: 283358 - DNA, 25 bp, probe
tcagattatggaagttttcttctat

SEQ ID NO: 283359 - DNA, 25 bp, probe
tcagttatggttcctttggtcgctc

SEQ ID NO: 283360 - DNA, 25 bp, probe
tcagtggggttatcctagtggctct

SEQ ID NO: 283361 - DNA, 25 bp, probe
tcaggggacaggtacctggtgtgcc

SEQ ID NO: 283362 - DNA, 25 bp, probe
tcaggggacaggtacctggtgtgcc

SEQ ID NO: 283363 - DNA, 25 bp, probe
tcagggacagggtccggggagccag

SEQ ID NO: 283364 - DNA, 25 bp, probe
tcagagtgtcctctggggggcacca

SEQ ID NO: 283365 - DNA, 25 bp, probe
tcagagtgtcctctggggggcacca

SEQ ID NO: 283366 - DNA, 25 bp, probe
tcagtggccactctgggtggttcta

SEQ ID NO: 283367 - DNA, 25 bp, probe
tcagtggccactctgggtggttcta

SEQ ID NO: 283368 - DNA, 25 bp, probe
tcagtggccactctgggtggttcta

SEQ ID NO: 283369 - DNA, 25 bp, probe
tcatgatgaccccttacgtggtgac

SEQ ID NO: 283370 - DNA, 25 bp, probe
tcatcgaccgctataagcgctggaa

SEQ ID NO: 283371 - DNA, 25 bp, probe
tcatccacacggacatcaagcccga

SEQ ID NO: 283372 - DNA, 25 bp, probe
tcatcctcatccggaaatgctccag

SEQ ID NO: 283373 - DNA, 25 bp, probe
tcatcctcatccggaaatgctccag

SEQ ID NO: 283374 - DNA, 25 bp, probe
tcacctgcaacagaacgtccacttc

SEQ ID NO: 283375 - DNA, 25 bp, probe
tcaggtgaaagctcaccacgccatg

SEQ ID NO: 283376 - DNA, 25 bp, probe
tcagggaccagaaccacaagcaaac

SEQ ID NO: 283377 - DNA, 25 bp, probe
tcaggagaccctgctgtcaagactg

SEQ ID NO: 283378 - DNA, 25 bp, probe
tcaggaagccggagtcgcaggaggc

SEQ ID NO: 283379 - DNA, 25 bp, probe
tcatgatgtacctgttgtcgccgga

SEQ ID NO: 283380 - DNA, 25 bp, probe
tcatggcccacatggcctccaagga

SEQ ID NO: 283381 - DNA, 25 bp, probe
tcatcgccctcatgagcgagaccgt

SEQ ID NO: 283382 - DNA, 25 bp, probe
tcatctccctcaagagtgggactga

SEQ ID NO: 283383 - DNA, 25 bp, probe
tcatctccctcaagagtgggactga

SEQ ID NO: 283384 - DNA, 25 bp, probe
tcatctctctccttgactggaattg

SEQ ID NO: 283385 - DNA, 25 bp, probe
tcatctctctccttgactggaattg

SEQ ID NO: 283386 - DNA, 25 bp, probe
tcatgccatggcctgtggatggaga

SEQ ID NO: 283387 - DNA, 25 bp, probe
tcatgccatggcctgtggatggaga

SEQ ID NO: 283388 - DNA, 25 bp, probe
tcatcctgggtatgggctacaaaga

SEQ ID NO: 283389 - DNA, 25 bp, probe
tcacctgaggtcaggagttcaagac

SEQ ID NO: 283390 - DNA, 25 bp, probe
tcatcgtcggtccgggctgccacga

SEQ ID NO: 283391 - DNA, 25 bp, probe
tcatcgacgcttttggtgagctccg

SEQ ID NO: 283392 - DNA, 25 bp, probe
tcatccacgtttgtggacaccagtg

SEQ ID NO: 283393 - DNA, 25 bp, probe
tcatccacagttacacggaaagcat

SEQ ID NO: 283394 - DNA, 25 bp, probe
tcatctccttggacaaagaagaaca

SEQ ID NO: 283395 - DNA, 25 bp, probe
tcatctccttggacaaagaagaaca

SEQ ID NO: 283396 - DNA, 25 bp, probe
tcatctcctgtcccaggattagcag

SEQ ID NO: 283397 - DNA, 25 bp, probe
tacctcccaaaggttctgcagggga

SEQ ID NO: 283398 - DNA, 25 bp, probe
tcaactcgaaagagtaccggggcac

SEQ ID NO: 283399 - DNA, 25 bp, probe
taccacgaagacattttcgggctca

SEQ ID NO: 283400 - DNA, 25 bp, probe
tcaaacgaagacactgtccccagct

SEQ ID NO: 283401 - DNA, 25 bp, probe
tcagaaggaggtcactttcccagct

SEQ ID NO: 283402 - DNA, 25 bp, probe
tcaggaaacaatcaccttgctccac

SEQ ID NO: 283403 - DNA, 25 bp, probe
tcatggaacaaactgtcacctaccc

SEQ ID NO: 283404 - DNA, 25 bp, probe
tcatccaggagatcgtcaagtacga

SEQ ID NO: 283405 - DNA, 25 bp, probe
tcatccagaagttcctcaagggcca

SEQ ID NO: 283406 - DNA, 25 bp, probe
tatcccaagccctttagggctacag

SEQ ID NO: 283407 - DNA, 25 bp, probe
tacccaaggtcacaaggccgaacat

SEQ ID NO: 283408 - DNA, 25 bp, probe
tcatccctgtagtaccgggctcgaa

SEQ ID NO: 283409 - DNA, 25 bp, probe
tcacgcctgtaatcccagcactttg

SEQ ID NO: 283410 - DNA, 25 bp, probe
caggaccctctgacaaagaaggcag

SEQ ID NO: 283411 - DNA, 25 bp, probe
tcaggcgttaaactgtcagtcgaac

SEQ ID NO: 283412 - DNA, 25 bp, probe
tcagtggttagagctgctcagcctg

SEQ ID NO: 283413 - DNA, 25 bp, probe
tcagtgtggtagcttgctcaacagg

SEQ ID NO: 283414 - DNA, 25 bp, probe
tcatggggtccctgctgcaaaggac

SEQ ID NO: 283415 - DNA, 25 bp, probe
tcatgggggactttgtggaccgtgg

SEQ ID NO: 283416 - DNA, 25 bp, probe
tcatgttccgagtgggtgacctgag

SEQ ID NO: 283417 - DNA, 25 bp, probe
tcatccacctggagggtgtcgtgac

SEQ ID NO: 283418 - DNA, 25 bp, probe
tcagccccaatgatgggttcctggc

SEQ ID NO: 283419 - DNA, 25 bp, probe
tcagccccaatgatgggttcctggc

SEQ ID NO: 283420 - DNA, 25 bp, probe
tcatcccccatgatgctgtgtgacc

SEQ ID NO: 283421 - DNA, 25 bp, probe
tcatcccccatcagatgatgggagt

SEQ ID NO: 283422 - DNA, 25 bp, probe
tcaggcctagctcagatgatgcggg

SEQ ID NO: 283423 - DNA, 25 bp, probe
tcagtccttgcctttgaagggtatg

SEQ ID NO: 283424 - DNA, 25 bp, probe
tcagttattcagattgacaaggtag

SEQ ID NO: 283425 - DNA, 25 bp, probe
taggtgcttcgtctgaaagtgaact

SEQ ID NO: 283426 - DNA, 25 bp, probe
tcatggttacgacctggtagtgaga

SEQ ID NO: 283427 - DNA, 25 bp, probe
tcaggttcttgaccatgaacagtga

SEQ ID NO: 283428 - DNA, 25 bp, probe
tcaggttcttgaccatgaacagtga

SEQ ID NO: 283429 - DNA, 25 bp, probe
tcagtgtttctcctgctgaagcgga

SEQ ID NO: 283430 - DNA, 25 bp, probe
tcaggttctgctcctttatgggacc

SEQ ID NO: 283431 - DNA, 25 bp, probe
tcaggttctgctcctttatgggacc

SEQ ID NO: 283432 - DNA, 25 bp, probe
tcatggtcttcgagtatatgcggca

SEQ ID NO: 283433 - DNA, 25 bp, probe
tcatggttcatggtggattagcaga

SEQ ID NO: 283434 - DNA, 25 bp, probe
tcacgtggcaaatgattgagcaaat

SEQ ID NO: 283435 - DNA, 25 bp, probe
tcatccaggtgaagagtcgaaaatt

SEQ ID NO: 283436 - DNA, 25 bp, probe
tcatcgcatgaggacagagaccaaa

SEQ ID NO: 283437 - DNA, 25 bp, probe
tcatccagatgccaaatatgccaag

SEQ ID NO: 283438 - DNA, 25 bp, probe
tcaccagcacttttgaccaagtcct

SEQ ID NO: 283439 - DNA, 25 bp, probe
tcacctgccacttccaacaaacagg

SEQ ID NO: 283440 - DNA, 25 bp, probe
tcaccttcctgggcagcccagagag

SEQ ID NO: 283441 - DNA, 25 bp, probe
tcatcctggtctgagacctcagagg

SEQ ID NO: 283442 - DNA, 25 bp, probe
tcactctgctggacggaccattagg

SEQ ID NO: 283443 - DNA, 25 bp, probe
tcagatctgggtctgccgcaaaggc

SEQ ID NO: 283444 - DNA, 25 bp, probe
tcagatggagggctgcaccccaaga

SEQ ID NO: 283445 - DNA, 25 bp, probe
tcatgacataggattctgccgccaa

SEQ ID NO: 283446 - DNA, 25 bp, probe
tcatgcacatagatgtccagccctc

SEQ ID NO: 283447 - DNA, 25 bp, probe
tcatgaagggcttcacctgccatca

SEQ ID NO: 283448 - DNA, 25 bp, probe
tcatgtcagtgagagcttcccacac

SEQ ID NO: 283449 - DNA, 25 bp, probe
tcagtgctgaagagcttccaggccc

SEQ ID NO: 283450 - DNA, 25 bp, probe
tcaggcaaatgcagcggcctacctg

SEQ ID NO: 283451 - DNA, 25 bp, probe
tcagtgcaagaggaggccttagctc

SEQ ID NO: 283452 - DNA, 25 bp, probe
tcaggacagagccaaccctggctcc

SEQ ID NO: 283453 - DNA, 25 bp, probe
tcaggtgcaggtcagcacgttgctg

SEQ ID NO: 283454 - DNA, 25 bp, probe
tcagggtggcctggacagagaagaa

SEQ ID NO: 283455 - DNA, 25 bp, probe
tcagttttcactgagggcagggaaa

SEQ ID NO: 283456 - DNA, 25 bp, probe
tcagttttcactgagggcagggaaa

SEQ ID NO: 283457 - DNA, 25 bp, probe
tcagtctttctcgaagcttggcgga

SEQ ID NO: 283458 - DNA, 25 bp, probe
tcagtccctttgaccatagtcggat

SEQ ID NO: 283459 - DNA, 25 bp, probe
tcagtccttttgtgctactcagatc

SEQ ID NO: 283460 - DNA, 25 bp, probe
tcagtccttttgtgctactcagatc

SEQ ID NO: 283461 - DNA, 25 bp, probe
tcagcatcctttatctgtgacttca

SEQ ID NO: 283462 - DNA, 25 bp, probe
tcagaggcttggcatttgccatatc

SEQ ID NO: 283463 - DNA, 25 bp, probe
tcagaggccttattttgtcatacta

SEQ ID NO: 283464 - DNA, 25 bp, probe
tcagaggccttattttgtcatacta

SEQ ID NO: 283465 - DNA, 25 bp, probe
tcaggtgtcttcttctacctgagct

SEQ ID NO: 283466 - DNA, 25 bp, probe
tcaggtgtcttcttctacctgagct

SEQ ID NO: 283467 - DNA, 25 bp, probe
tcatcgcttgctacttctacgagca

SEQ ID NO: 283468 - DNA, 25 bp, probe
tcatccttcatctgattccagagca

SEQ ID NO: 283469 - DNA, 25 bp, probe
tcaggctccatctgtttggagaaaa

SEQ ID NO: 283470 - DNA, 25 bp, probe
tcaggcacaggcgttttcaggaaac

SEQ ID NO: 283471 - DNA, 25 bp, probe
tcaggcatcagcctatttccttgca

SEQ ID NO: 283472 - DNA, 25 bp, probe
tcatgacacagcctgtttcaaccag

SEQ ID NO: 283473 - DNA, 25 bp, probe
tcagagtcacctgatgtcaaccttg

SEQ ID NO: 283474 - DNA, 25 bp, probe
tcatgttcatctatttcaactcctt

SEQ ID NO: 283475 - DNA, 25 bp, probe
tcatgtttttcatttgatactttta

SEQ ID NO: 283476 - DNA, 25 bp, probe
tcatgtttttcatttgatactttta

SEQ ID NO: 283477 - DNA, 25 bp, probe
tcagtttttctcttaagtgcctgtt

SEQ ID NO: 283478 - DNA, 25 bp, probe
tcagaggtttaacatgggttgctta

SEQ ID NO: 283479 - DNA, 25 bp, probe
tcatgagtgttttcgagggggtttg

SEQ ID NO: 283480 - DNA, 25 bp, probe
tcatgcatctgttctacgtgcgggc

SEQ ID NO: 283481 - DNA, 25 bp, probe
tcatgcatctgttctacgtgcgggc

SEQ ID NO: 283482 - DNA, 25 bp, probe
tcatgcatctgttctacgtgcgggc

SEQ ID NO: 283483 - DNA, 25 bp, probe
tcatgcatctgttctacgtgcgggc

SEQ ID NO: 283484 - DNA, 25 bp, probe
tcatgcagctctttcaggaccatgg

SEQ ID NO: 283485 - DNA, 25 bp, probe
tcatgccctgaataccactgagggc

SEQ ID NO: 283486 - DNA, 25 bp, probe
tcaggtattaagtcccgggcagcga

SEQ ID NO: 283487 - DNA, 25 bp, probe
tcaggtttcagagcccaagtcagga

SEQ ID NO: 283488 - DNA, 25 bp, probe
tcagcgtgtgcctaccctacgccgg

SEQ ID NO: 283489 - DNA, 25 bp, probe
tcacgtgggagaacctgcaccagca

SEQ ID NO: 283490 - DNA, 25 bp, probe
tcacgctggggaaacggataggctt

SEQ ID NO: 283491 - DNA, 25 bp, probe
tcaggatcgtgttaacggaggcggt

SEQ ID NO: 283492 - DNA, 25 bp, probe
tcatgttgctgtaacagttggaggc

SEQ ID NO: 283493 - DNA, 25 bp, probe
tcatgctgtcggatctggccgaggt

SEQ ID NO: 283494 - DNA, 25 bp, probe
tcatgcggggctgctggcagcggga

SEQ ID NO: 283495 - DNA, 25 bp, probe
tcatgcgggagtgctggcatgccgc

SEQ ID NO: 283496 - DNA, 25 bp, probe
tcatgctggccagcctggcagtgct

SEQ ID NO: 283497 - DNA, 25 bp, probe
tcatggtgcacatgccggagatcgc

SEQ ID NO: 283498 - DNA, 25 bp, probe
tcatggtgcacatgccggagatcgc

SEQ ID NO: 283499 - DNA, 25 bp, probe
tcatggctgagctgctccagggcaa

SEQ ID NO: 283500 - DNA, 25 bp, probe
tcatggctgagctgctccagggcaa

SEQ ID NO: 283501 - DNA, 25 bp, probe
tcagagacatgctgctgtcggggag

SEQ ID NO: 283502 - DNA, 25 bp, probe
tcatggcattgatggtccggctgca

SEQ ID NO: 283503 - DNA, 25 bp, probe
tcatggatggagggtatctggatca

SEQ ID NO: 283504 - DNA, 25 bp, probe
tcatgggctgcggaggactgggccc

SEQ ID NO: 283505 - DNA, 25 bp, probe
tcatgggctgcggaggactgggccc

SEQ ID NO: 283506 - DNA, 25 bp, probe
tcaggagggagctagcactggacgc

SEQ ID NO: 283507 - DNA, 25 bp, probe
tcagagctgtaaaacatctgaacct

SEQ ID NO: 283508 - DNA, 25 bp, probe
tcagatgcagaaaattgcctaaaga

SEQ ID NO: 283509 - DNA, 25 bp, probe
tcatgatgtgagttatagcccaaac

SEQ ID NO: 283510 - DNA, 25 bp, probe
tcatgtgttcagctggccagcaaac

SEQ ID NO: 283511 - DNA, 25 bp, probe
tcatgctgttgctcatggcgatgca

SEQ ID NO: 283512 - DNA, 25 bp, probe
tcatgctagagctaatgggagatgt

SEQ ID NO: 283513 - DNA, 25 bp, probe
tcatgctgactctatgagatgggga

SEQ ID NO: 283514 - DNA, 25 bp, probe
tcatgctcactcaggcatgctggta

SEQ ID NO: 283515 - DNA, 25 bp, probe
tcatgctcctggtgacatgggacac

SEQ ID NO: 283516 - DNA, 25 bp, probe
tcagtctctgtgtaatcatctgaag

SEQ ID NO: 283517 - DNA, 25 bp, probe
tcagtctttgtcaatgctctaacaa

SEQ ID NO: 283518 - DNA, 25 bp, probe
tcatccttctccatcctgaaaagaa

SEQ ID NO: 283519 - DNA, 25 bp, probe
tcatgccatttccattgttgagtga

SEQ ID NO: 283520 - DNA, 25 bp, probe
tcatccagtcccagtgtcagaatga

SEQ ID NO: 283521 - DNA, 25 bp, probe
tcatgcacttctcccagatgctata

SEQ ID NO: 283522 - DNA, 25 bp, probe
tcagtctgtctctaagatgcttact

SEQ ID NO: 283523 - DNA, 25 bp, probe
tcagttgcatcctacaatttgccac

SEQ ID NO: 283524 - DNA, 25 bp, probe
tcagctgtcaccagcacttttgacc

SEQ ID NO: 283525 - DNA, 25 bp, probe
tcagatggtcctggcacctttgaat

SEQ ID NO: 283526 - DNA, 25 bp, probe
tcagagagtacaccaagccctggat

SEQ ID NO: 283527 - DNA, 25 bp, probe
tcagagagtacaccaagccctggat

SEQ ID NO: 283528 - DNA, 25 bp, probe
tcagagatctgagccaaccttggcc

SEQ ID NO: 283529 - DNA, 25 bp, probe
tcaggattaccagattacatgagcc

SEQ ID NO: 283530 - DNA, 25 bp, probe
tcagtgtaacaacattatctgacca

SEQ ID NO: 283531 - DNA, 25 bp, probe
tcagtgtactcatcaattttaagca

SEQ ID NO: 283532 - DNA, 25 bp, probe
tcagcggagccatctgtgtttacca

SEQ ID NO: 283533 - DNA, 25 bp, probe
tcatgggaccagacgtgatgctgga

SEQ ID NO: 283534 - DNA, 25 bp, probe
tcatgggaccagacgtgatgctgga

SEQ ID NO: 283535 - DNA, 25 bp, probe
tcatggtgacccagtgtgttgagaa

SEQ ID NO: 283536 - DNA, 25 bp, probe
tcaggatcctccagatggttgctga

SEQ ID NO: 283537 - DNA, 25 bp, probe
tcagtatccactgggtgccttggaa

SEQ ID NO: 283538 - DNA, 25 bp, probe
tcagtacctgggctctgtttcagag

SEQ ID NO: 283539 - DNA, 25 bp, probe
tcactctccgggcgcattgttggag

SEQ ID NO: 283540 - DNA, 25 bp, probe
tcaggtccaagtgtactgttggccg

SEQ ID NO: 283541 - DNA, 25 bp, probe
tcaggggcttggatttcgtgtgccg

SEQ ID NO: 283542 - DNA, 25 bp, probe
tcagggcccgagattgccggggtgt

SEQ ID NO: 283543 - DNA, 25 bp, probe
tcagctacctcgggttggggtggga

SEQ ID NO: 283544 - DNA, 25 bp, probe
tcagatcgcctcgggtatggtgtac

SEQ ID NO: 283545 - DNA, 25 bp, probe
tcatgaagatcctggttgttgtatt

SEQ ID NO: 283546 - DNA, 25 bp, probe
tcatgaagaccatgggcatgtcctc

SEQ ID NO: 283547 - DNA, 25 bp, probe
tcatgacagaacttgtcttgttcct

SEQ ID NO: 283548 - DNA, 25 bp, probe
tcatggcagattgtttgtgctttca

SEQ ID NO: 283549 - DNA, 25 bp, probe
tcagacatttatcctttgtttcacc

SEQ ID NO: 283550 - DNA, 25 bp, probe
tcagatctttctttgtagtgtccca

SEQ ID NO: 283551 - DNA, 25 bp, probe
tcagatctttctttgtagtgtccca

SEQ ID NO: 283552 - DNA, 25 bp, probe
tcagatcttctcagtgaatttaaga

SEQ ID NO: 283553 - DNA, 25 bp, probe
tcagtgcttcgaactattcatggaa

SEQ ID NO: 283554 - DNA, 25 bp, probe
tcaggctgtgccttaattcagaaca

SEQ ID NO: 283555 - DNA, 25 bp, probe
tcatgttgcagcaattcactgtaaa

SEQ ID NO: 283556 - DNA, 25 bp, probe
tcatgtctctcatttctagataaga

SEQ ID NO: 283557 - DNA, 25 bp, probe
tcatgtctctctttccattacatga

SEQ ID NO: 283558 - DNA, 25 bp, probe
tcatgttctgctttcgattcgttaa

SEQ ID NO: 283559 - DNA, 25 bp, probe
tcatgttctgctttcgattcgttaa

SEQ ID NO: 283560 - DNA, 25 bp, probe
tcagttcttacacattccatcttac

SEQ ID NO: 283561 - DNA, 25 bp, probe
tcacatgtttagagttgcaatcgta

SEQ ID NO: 283562 - DNA, 25 bp, probe
tcacatgtttagagttgcaatcgta

SEQ ID NO: 283563 - DNA, 25 bp, probe
tcaatgtcttcgagttggagcggct

SEQ ID NO: 283564 - DNA, 25 bp, probe
tcagatgtttggagctttggagtgg

SEQ ID NO: 283565 - DNA, 25 bp, probe
tcaggatcctggatttcgggctggc

SEQ ID NO: 283566 - DNA, 25 bp, probe
tcaggtagcggttgagtgcgatggc

SEQ ID NO: 283567 - DNA, 25 bp, probe
tcagttacaggagcgagagcgagct

SEQ ID NO: 283568 - DNA, 25 bp, probe
tcagttcacagagattgagggcaga

SEQ ID NO: 283569 - DNA, 25 bp, probe
tcaggctcacaagcttgatctaaga

SEQ ID NO: 283570 - DNA, 25 bp, probe
tcaggcccaatcattacgcactgca

SEQ ID NO: 283571 - DNA, 25 bp, probe
tcaggaggccacatatacagcccct

SEQ ID NO: 283572 - DNA, 25 bp, probe
tcacgcaagcatggttaacgtccct

SEQ ID NO: 283573 - DNA, 25 bp, probe
tcactagatgttgtgaacggcctgc

SEQ ID NO: 283574 - DNA, 25 bp, probe
tcagtggtggacctgacctgccgtc

SEQ ID NO: 283575 - DNA, 25 bp, probe
tcagtggggcagccagagctcagac

SEQ ID NO: 283576 - DNA, 25 bp, probe
tcaggcagggggcaggagcactgtc

SEQ ID NO: 283577 - DNA, 25 bp, probe
tcagacagggggtgggctttgccta

SEQ ID NO: 283578 - DNA, 25 bp, probe
taatcaaggtcctgggaactccaac

SEQ ID NO: 283579 - DNA, 25 bp, probe
tcaacgagttcccagaggaacttaa

SEQ ID NO: 283580 - DNA, 25 bp, probe
tcagagtacctcgggaatgaacttc

SEQ ID NO: 283581 - DNA, 25 bp, probe
tcagagtaacacaggattcactgtt

SEQ ID NO: 283582 - DNA, 25 bp, probe
tcagactttttaaattcctgcttaa

SEQ ID NO: 283583 - DNA, 25 bp, probe
tcagattggtttgagtgccctttgc

SEQ ID NO: 283584 - DNA, 25 bp, probe
tcatgactcagatccgagtgccctt

SEQ ID NO: 283585 - DNA, 25 bp, probe
tcagagtgagcatcagcgacctaca

SEQ ID NO: 283586 - DNA, 25 bp, probe
tcagagtgagcatcagcgacctaca

SEQ ID NO: 283587 - DNA, 25 bp, probe
tcatgatgctggagccagaccccaa

SEQ ID NO: 283588 - DNA, 25 bp, probe
tcatgcctggccgctacaaccagga

SEQ ID NO: 283589 - DNA, 25 bp, probe
tcatgaagactctctatcacccaaa

SEQ ID NO: 283590 - DNA, 25 bp, probe
tcatgatgaccattgcctacaccaa

SEQ ID NO: 283591 - DNA, 25 bp, probe
tcatgatgaccattgcctacaccaa

SEQ ID NO: 283592 - DNA, 25 bp, probe
tcatgaccacagtccatgccatcac

SEQ ID NO: 283593 - DNA, 25 bp, probe
tcatgaccctgtgcgtgatcagcat

SEQ ID NO: 283594 - DNA, 25 bp, probe
tcatgacgctctggttgagctcagt

SEQ ID NO: 283595 - DNA, 25 bp, probe
tcagaagctcttcgtagtgcgtctt

SEQ ID NO: 283596 - DNA, 25 bp, probe
tcagcatagccgagatcattaccct

SEQ ID NO: 283597 - DNA, 25 bp, probe
tcagaactcacaagccattgctccc

SEQ ID NO: 283598 - DNA, 25 bp, probe
tcagaactgccaattgcaccactgc

SEQ ID NO: 283599 - DNA, 25 bp, probe
tcagaactgccaattgcaccactgc

SEQ ID NO: 283600 - DNA, 25 bp, probe
tcaggtgtccaggctgacacctccc

SEQ ID NO: 283601 - DNA, 25 bp, probe
tcaggatgattcatctagcagacag

SEQ ID NO: 283602 - DNA, 25 bp, probe
tcagtgcagaatctctgcgggagaa

SEQ ID NO: 283603 - DNA, 25 bp, probe
tcatggccaacgacgaggagtcaga

SEQ ID NO: 283604 - DNA, 25 bp, probe
tcaggaacaagcgggcgctgctcga

SEQ ID NO: 283605 - DNA, 25 bp, probe
tcaggagaaactcgggcactcccta

SEQ ID NO: 283606 - DNA, 25 bp, probe
tcaggacctatctaggcagacccca

SEQ ID NO: 283607 - DNA, 25 bp, probe
tcatggaagtggtgggcacacccag

SEQ ID NO: 283608 - DNA, 25 bp, probe
tcatgtgggaggtgatggcctttgg

SEQ ID NO: 283609 - DNA, 25 bp, probe
tcaggggatttctatgacctgtatg

SEQ ID NO: 283610 - DNA, 25 bp, probe
tcagggtttctggtgatcttgcttc

SEQ ID NO: 283611 - DNA, 25 bp, probe
tcagggggctcagagtctgggtacc

SEQ ID NO: 283612 - DNA, 25 bp, probe
tcagggggctcagagtctgggtacc

SEQ ID NO: 283613 - DNA, 25 bp, probe
tcaggggacgggatggggtacacag

SEQ ID NO: 283614 - DNA, 25 bp, probe
tcaggtggaggtggggtgggtcagc

SEQ ID NO: 283615 - DNA, 25 bp, probe
tcagcgtggggtgggaattcccgcg

SEQ ID NO: 283616 - DNA, 25 bp, probe
tcagcgtggggtgggaattcccgcg

SEQ ID NO: 283617 - DNA, 25 bp, probe
tcagtgggggttgacagctccctaa

SEQ ID NO: 283618 - DNA, 25 bp, probe
tcagggtgtggtagaacactttcaa

SEQ ID NO: 283619 - DNA, 25 bp, probe
tcaccttttgtcaagaacagcccta

SEQ ID NO: 283620 - DNA, 25 bp, probe
tcaccttttgtcaagaacagcccta

SEQ ID NO: 283621 - DNA, 25 bp, probe
tcagcttttgtgctaaaactctcta

SEQ ID NO: 283622 - DNA, 25 bp, probe
tcagccttagaacaagaaccttacc

SEQ ID NO: 283623 - DNA, 25 bp, probe
tagttctggaaacaaccctgtactt

SEQ ID NO: 283624 - DNA, 25 bp, probe
tatctcctggatggaaaccccttaa

SEQ ID NO: 283625 - DNA, 25 bp, probe
tactttggattttaacctcttagag

SEQ ID NO: 283626 - DNA, 25 bp, probe
tcaccttgacgcttatgaacctcta

SEQ ID NO: 283627 - DNA, 25 bp, probe
tcatgtcttactgatctaaccctaa

SEQ ID NO: 283628 - DNA, 25 bp, probe
tcagtgttcactgagtactctccat

SEQ ID NO: 283629 - DNA, 25 bp, probe
tcagatgctctcaggagggtgccca

SEQ ID NO: 283630 - DNA, 25 bp, probe
tcagatcatcatcagtgctgaagag

SEQ ID NO: 283631 - DNA, 25 bp, probe
tatgaccatgcccgcataaaactga

SEQ ID NO: 283632 - DNA, 25 bp, probe
tcagtccactcccaacaatactgtg

SEQ ID NO: 283633 - DNA, 25 bp, probe
tcagtccactcccaacaatactgtg

SEQ ID NO: 283634 - DNA, 25 bp, probe
tcagccataccccattgaaatcgtg

SEQ ID NO: 283635 - DNA, 25 bp, probe
tcagccataccccattgaaatcgtg

SEQ ID NO: 283636 - DNA, 25 bp, probe
tcagccataccccattgaaatcgtg

SEQ ID NO: 283637 - DNA, 25 bp, probe
tcactcgacccaagctgacgtcggt

SEQ ID NO: 283638 - DNA, 25 bp, probe
tcatgatgggcccatgtgtgacctc

SEQ ID NO: 283639 - DNA, 25 bp, probe
tcatgagatggggagtgtgcacagt

SEQ ID NO: 283640 - DNA, 25 bp, probe
tcagagtgcttctaatcatcacagt

SEQ ID NO: 283641 - DNA, 25 bp, probe
tcaggttcatgctcatattcattat

SEQ ID NO: 283642 - DNA, 25 bp, probe
tcaggcttatccgatgtgctacatg

SEQ ID NO: 283643 - DNA, 25 bp, probe
tcaggcttatccgatgtgctacatg

SEQ ID NO: 283644 - DNA, 25 bp, probe
tcaggcagctatgcagttgctcttc

SEQ ID NO: 283645 - DNA, 25 bp, probe
tcaggtctaccattgcttgttcaga

SEQ ID NO: 283646 - DNA, 25 bp, probe
tcaggtctaccattgcttgttcaga

SEQ ID NO: 283647 - DNA, 25 bp, probe
tcaggtcattgccaaccttacatga

SEQ ID NO: 283648 - DNA, 25 bp, probe
tcaggtcattgccaaccttacatga

SEQ ID NO: 283649 - DNA, 25 bp, probe
tcaggcatttgctaactcttgggaa

SEQ ID NO: 283650 - DNA, 25 bp, probe
tcacctttgatttccagattgaatc

SEQ ID NO: 283651 - DNA, 25 bp, probe
tcacctttgatttccagattgaatc

SEQ ID NO: 283652 - DNA, 25 bp, probe
tcaccattaactggcctgatctaac

SEQ ID NO: 283653 - DNA, 25 bp, probe
taccttgcaagcgatcctatctgga

SEQ ID NO: 283654 - DNA, 25 bp, probe
tcacctggcagaattcctcatgggc

SEQ ID NO: 283655 - DNA, 25 bp, probe
tcagcccaagaatttgtcaggaggt

SEQ ID NO: 283656 - DNA, 25 bp, probe
tcagcaccaaagccggtggacagcg

SEQ ID NO: 283657 - DNA, 25 bp, probe
tagatcagcaaaccggggcctacta

SEQ ID NO: 283658 - DNA, 25 bp, probe
tagatcagcaaaccggggcctacta

SEQ ID NO: 283659 - DNA, 25 bp, probe
tcagagagaagatggtgtggtctac

SEQ ID NO: 283660 - DNA, 25 bp, probe
tcatggagtatgttccgggctgtga

SEQ ID NO: 283661 - DNA, 25 bp, probe
tcatgtggtaactgcgagagcttgc

SEQ ID NO: 283662 - DNA, 25 bp, probe
tcatggcattcaaccggggcaagcg

SEQ ID NO: 283663 - DNA, 25 bp, probe
tcatgatcttcaacagtgggctgct

SEQ ID NO: 283664 - DNA, 25 bp, probe
tcatgatcttcaacagtgggctgct

SEQ ID NO: 283665 - DNA, 25 bp, probe
tcatgtcttgcaacaaccctgtgag

SEQ ID NO: 283666 - DNA, 25 bp, probe
tcatgtatctcaggagacccactga

SEQ ID NO: 283667 - DNA, 25 bp, probe
tcatgtatctcaggagacccactga

SEQ ID NO: 283668 - DNA, 25 bp, probe
tcagtcatcactgaaacacaatgag

SEQ ID NO: 283669 - DNA, 25 bp, probe
tcagtatctgcagaacagtaagcga

SEQ ID NO: 283670 - DNA, 25 bp, probe
tcatggaagccatagagtacatcga

SEQ ID NO: 283671 - DNA, 25 bp, probe
tcatggaagccatagagtacatcga

SEQ ID NO: 283672 - DNA, 25 bp, probe
tcatggatcagttaagtacacttga

SEQ ID NO: 283673 - DNA, 25 bp, probe
tcagggcagtacaatgtgactttga

SEQ ID NO: 283674 - DNA, 25 bp, probe
tcagatcgagtccaaggcagcctat

SEQ ID NO: 283675 - DNA, 25 bp, probe
tcagagggactcttggcagctgtag

SEQ ID NO: 283676 - DNA, 25 bp, probe
tcagtgttgactggtgggctcttgg

SEQ ID NO: 283677 - DNA, 25 bp, probe
tcagtggctacttggtggactctgt

SEQ ID NO: 283678 - DNA, 25 bp, probe
tcagcttgcaaccatggtaacgttt

SEQ ID NO: 283679 - DNA, 25 bp, probe
tcagatggaatgctttacatggttt

SEQ ID NO: 283680 - DNA, 25 bp, probe
tcagatgtgtatgcgtttgggattg

SEQ ID NO: 283681 - DNA, 25 bp, probe
tcagtcgtgtgcagctctgagggca

SEQ ID NO: 283682 - DNA, 25 bp, probe
tcagggagatctcgctgctcaagga

SEQ ID NO: 283683 - DNA, 25 bp, probe
tcaggcagatgttgtccgcaatgga

SEQ ID NO: 283684 - DNA, 25 bp, probe
tcagcaaatggaaccaagatggagg

SEQ ID NO: 283685 - DNA, 25 bp, probe
tcagcaagacatcctacaagagaat

SEQ ID NO: 283686 - DNA, 25 bp, probe
tcagcgagagtgccaaccaggcctt

SEQ ID NO: 283687 - DNA, 25 bp, probe
tcagcgagagtgccaaccaggcctt

SEQ ID NO: 283688 - DNA, 25 bp, probe
tcagcagaaggtaaagcagagtatt

SEQ ID NO: 283689 - DNA, 25 bp, probe
tcagcagaaggtaaagcagagtatt

SEQ ID NO: 283690 - DNA, 25 bp, probe
tcagaggaggacgtgagccagtttg

SEQ ID NO: 283691 - DNA, 25 bp, probe
tcagaggtggaggctattctctttg

SEQ ID NO: 283692 - DNA, 25 bp, probe
tcaggtagtgtggctactccttgtc

SEQ ID NO: 283693 - DNA, 25 bp, probe
tcacctttgggtgtgcggtgtgccc

SEQ ID NO: 283694 - DNA, 25 bp, probe
tcaccttggacggaatgggatgggg

SEQ ID NO: 283695 - DNA, 25 bp, probe
tcaccttttcccggggaggagagag

SEQ ID NO: 283696 - DNA, 25 bp, probe
tcacctacacggagggtggggaggc

SEQ ID NO: 283697 - DNA, 25 bp, probe
tcaggcgagcaactggggttgggcg

SEQ ID NO: 283698 - DNA, 25 bp, probe
tcagggaaattgcaggtctgcaggg

SEQ ID NO: 283699 - DNA, 25 bp, probe
tcagtgtggcaaagcgggggcagga

SEQ ID NO: 283700 - DNA, 25 bp, probe
tcaggggaacagcgagcagatcaaa

SEQ ID NO: 283701 - DNA, 25 bp, probe
tcagggagcgacctgggcaaagaca

SEQ ID NO: 283702 - DNA, 25 bp, probe
tcagtgtgaagctcttgtcagaaga

SEQ ID NO: 283703 - DNA, 25 bp, probe
tcaggagaactggtcgccatcaaga

SEQ ID NO: 283704 - DNA, 25 bp, probe
tcaggaaagctcaatcagatacaaa

SEQ ID NO: 283705 - DNA, 25 bp, probe
tcagagaaactcaagctattgcatg

SEQ ID NO: 283706 - DNA, 25 bp, probe
tcagagaccactcggctctgagctt

SEQ ID NO: 283707 - DNA, 25 bp, probe
tcatggtgcacgagtcctcagcact

SEQ ID NO: 283708 - DNA, 25 bp, probe
tcatgggagcagacgctgcctacgc

SEQ ID NO: 283709 - DNA, 25 bp, probe
tcatggcgagagggatgctccacct

SEQ ID NO: 283710 - DNA, 25 bp, probe
tcatggagcatgtgcgagaccaccc

SEQ ID NO: 283711 - DNA, 25 bp, probe
tcatggaagtcccaatcacacagca

SEQ ID NO: 283712 - DNA, 25 bp, probe
tcaggcataggcctgcaaacccagg

SEQ ID NO: 283713 - DNA, 25 bp, probe
tcagctaacgcttccagaccgcggc

SEQ ID NO: 283714 - DNA, 25 bp, probe
tcagaagagccggcgtgacccggcc

SEQ ID NO: 283715 - DNA, 25 bp, probe
tcagaagaggctcttggccctggac

SEQ ID NO: 283716 - DNA, 25 bp, probe
tcaaaagcaccagcaggcacgttaa

SEQ ID NO: 283717 - DNA, 25 bp, probe
tcaacaacgtcacgggcatcgtaca

SEQ ID NO: 283718 - DNA, 25 bp, probe
tcaacaacgtcacgggcatcgtaca

SEQ ID NO: 283719 - DNA, 25 bp, probe
taattaccattggtggccttccaga

SEQ ID NO: 283720 - DNA, 25 bp, probe
tcagatttccattgtgtggcctggt

SEQ ID NO: 283721 - DNA, 25 bp, probe
tcagctacctgtaggggcctgggga

SEQ ID NO: 283722 - DNA, 25 bp, probe
tcagcaacctttcacctttgtgtat

SEQ ID NO: 283723 - DNA, 25 bp, probe
tcagcagttttatcctggccttgta

SEQ ID NO: 283724 - DNA, 25 bp, probe
tacgtattttccgtagtgctctggg

SEQ ID NO: 283725 - DNA, 25 bp, probe
tcaaagattttgcccaactggtcgg

SEQ ID NO: 283726 - DNA, 25 bp, probe
tcaacaatttcttggcatagtgcct

SEQ ID NO: 283727 - DNA, 25 bp, probe
tcacggccttcatggatggtgcctt

SEQ ID NO: 283728 - DNA, 25 bp, probe
tcactgactctgctaggtggtgccc

SEQ ID NO: 283729 - DNA, 25 bp, probe
tcagtgtctctaagattgtggtgca

SEQ ID NO: 283730 - DNA, 25 bp, probe
tcagtgttgtacgacgatgtatcaa

SEQ ID NO: 283731 - DNA, 25 bp, probe
tcatgtgcttgagcagactgtaaaa

SEQ ID NO: 283732 - DNA, 25 bp, probe
tcagctgctggagaagagatacgaa

SEQ ID NO: 283733 - DNA, 25 bp, probe
tcagctgctggagaagagatacgaa

SEQ ID NO: 283734 - DNA, 25 bp, probe
tcagctgctggagaagagatacgaa

SEQ ID NO: 283735 - DNA, 25 bp, probe
tcagtatgtgagatatagattctaa

SEQ ID NO: 283736 - DNA, 25 bp, probe
tcaggcaggcacctagcaattccat

SEQ ID NO: 283737 - DNA, 25 bp, probe
tcaggcagcccagtaatagtcctcc

SEQ ID NO: 283738 - DNA, 25 bp, probe
tcaggcagcccagtaatagtcctcc

SEQ ID NO: 283739 - DNA, 25 bp, probe
tcatgggccaactaatcttctgtgc

SEQ ID NO: 283740 - DNA, 25 bp, probe
tcatgggccaactaatcttctgtgc

SEQ ID NO: 283741 - DNA, 25 bp, probe
tcatgtgggaagtcatgtcatttgg

SEQ ID NO: 283742 - DNA, 25 bp, probe
tatctgggaggattttttggttgcc

SEQ ID NO: 283743 - DNA, 25 bp, probe
tatctgggaggattttttggttgcc

SEQ ID NO: 283744 - DNA, 25 bp, probe
tcagctgggtctattttgtggggcc

SEQ ID NO: 283745 - DNA, 25 bp, probe
tcagctgggtctattttgtggggcc

SEQ ID NO: 283746 - DNA, 25 bp, probe
tcagtgtgttctggtcatcttgtgg

SEQ ID NO: 283747 - DNA, 25 bp, probe
tcatgtgagcatactggccagtgtg

SEQ ID NO: 283748 - DNA, 25 bp, probe
tcacggcaatgcggctgcactggtg

SEQ ID NO: 283749 - DNA, 25 bp, probe
tcatgggcataggtgaccgctgtga

SEQ ID NO: 283750 - DNA, 25 bp, probe
tcagcacagaaggagaccagctctt

SEQ ID NO: 283751 - DNA, 25 bp, probe
tcaccaaacaatcccagtggctcaa

SEQ ID NO: 283752 - DNA, 25 bp, probe
tcaccaaacaatcccagtggctcaa

SEQ ID NO: 283753 - DNA, 25 bp, probe
tcacctaaagagaccaaggctcaga

SEQ ID NO: 283754 - DNA, 25 bp, probe
tcacctaaagagaccaaggctcaga

SEQ ID NO: 283755 - DNA, 25 bp, probe
tacttaactgtttcaaagccaagac

SEQ ID NO: 283756 - DNA, 25 bp, probe
tcaaaccacgcattaaaaccaaaag

SEQ ID NO: 283757 - DNA, 25 bp, probe
tcagaactcccttcaaacacaaaga

SEQ ID NO: 283758 - DNA, 25 bp, probe
tcagcaactacctccaaactcagga

SEQ ID NO: 283759 - DNA, 25 bp, probe
tcagagaaagcaccgctcacaacta

SEQ ID NO: 283760 - DNA, 25 bp, probe
tcatggatgaagacattgctcacaa

SEQ ID NO: 283761 - DNA, 25 bp, probe
tcagatgctgagacacatgtctccg

SEQ ID NO: 283762 - DNA, 25 bp, probe
tcagagtgacacatgtccgctggcc

SEQ ID NO: 283763 - DNA, 25 bp, probe
tcagagtgacacatgtccgctggcc

SEQ ID NO: 283764 - DNA, 25 bp, probe
tcagagctgatgtgttcacctgggc

SEQ ID NO: 283765 - DNA, 25 bp, probe
tcaggcctgcagatctcagcctggg

SEQ ID NO: 283766 - DNA, 25 bp, probe
tcaggccagctgtttcatggccgag

SEQ ID NO: 283767 - DNA, 25 bp, probe
tcatggccagtgtgcacagtgcagc

SEQ ID NO: 283768 - DNA, 25 bp, probe
tcagtgtggtgtggcagcggcagag

SEQ ID NO: 283769 - DNA, 25 bp, probe
tcagctcgggtggccgagcacggca

SEQ ID NO: 283770 - DNA, 25 bp, probe
tcagctcgggtggccgagcacggca

SEQ ID NO: 283771 - DNA, 25 bp, probe
tcagtcagggctgcagtgagccatg

SEQ ID NO: 283772 - DNA, 25 bp, probe
tcaggctggtctgcggagcctgcag

SEQ ID NO: 283773 - DNA, 25 bp, probe
tcagggcagtaggctgggagtcagt

SEQ ID NO: 283774 - DNA, 25 bp, probe
tcaggtatgtgagctctatggtggt

SEQ ID NO: 283775 - DNA, 25 bp, probe
tcaggcgatgtgctttatggcaggc

SEQ ID NO: 283776 - DNA, 25 bp, probe
tcaccagagatattgtggatggcat

SEQ ID NO: 283777 - DNA, 25 bp, probe
tcagatcagtgaagtggagcccaaa

SEQ ID NO: 283778 - DNA, 25 bp, probe
tcagatcaagtcgggaactccatac

SEQ ID NO: 283779 - DNA, 25 bp, probe
tcagtcaagattggagacctcggtc

SEQ ID NO: 283780 - DNA, 25 bp, probe
tcagatccagatgttacaacgggca

SEQ ID NO: 283781 - DNA, 25 bp, probe
tcagtgtggagccttacatactggg

SEQ ID NO: 283782 - DNA, 25 bp, probe
tcagccgtgagtcacactacatgcc

SEQ ID NO: 283783 - DNA, 25 bp, probe
tcagaggtggaaacactacagacac

SEQ ID NO: 283784 - DNA, 25 bp, probe
tcaggggcgtatccacaaaatcacc

SEQ ID NO: 283785 - DNA, 25 bp, probe
tcaggtggcctctgaaacaccactc

SEQ ID NO: 283786 - DNA, 25 bp, probe
tcaggtggcctctgaaacaccactc

SEQ ID NO: 283787 - DNA, 25 bp, probe
tcaggttgccctgaagatcatccgc

SEQ ID NO: 283788 - DNA, 25 bp, probe
tcaggctgatgagctccaacataac

SEQ ID NO: 283789 - DNA, 25 bp, probe
tcagcggagcaggcccaacgattct

SEQ ID NO: 283790 - DNA, 25 bp, probe
tcagcaggatgaggccctgggttgc

SEQ ID NO: 283791 - DNA, 25 bp, probe
tcagcccaggcccagctggggagaa

SEQ ID NO: 283792 - DNA, 25 bp, probe
tcagcccaggcccagctggggagaa

SEQ ID NO: 283793 - DNA, 25 bp, probe
tcacccaggccagtggggtctggtt

SEQ ID NO: 283794 - DNA, 25 bp, probe
tcacccctgtggtgggctttttaag

SEQ ID NO: 283795 - DNA, 25 bp, probe
tcactccctttgtggactttattta

SEQ ID NO: 283796 - DNA, 25 bp, probe
tcacccttttgtcaaattgttattt

SEQ ID NO: 283797 - DNA, 25 bp, probe
tcaccctgtggtgcaacacttgaaa

SEQ ID NO: 283798 - DNA, 25 bp, probe
tcaccacctggtggcccatggtaga

SEQ ID NO: 283799 - DNA, 25 bp, probe
tcaccattaggtcactcaagaagta

SEQ ID NO: 283800 - DNA, 25 bp, probe
tcaccatcaagtatgaccccaagga

SEQ ID NO: 283801 - DNA, 25 bp, probe
tcaccaacgtggacaccaccacgga

SEQ ID NO: 283802 - DNA, 25 bp, probe
tcaccaacgtggacaccaccacgga

SEQ ID NO: 283803 - DNA, 25 bp, probe
tcacccagtgttcccagaacaccaa

SEQ ID NO: 283804 - DNA, 25 bp, probe
tcaccaagaagttccgcaagcacct

SEQ ID NO: 283805 - DNA, 25 bp, probe
tcaccacagggttctgagaacattt

SEQ ID NO: 283806 - DNA, 25 bp, probe
tcagccagaggactttggaactgtg

SEQ ID NO: 283807 - DNA, 25 bp, probe
tcagccaaggaagcttcaccagggt

SEQ ID NO: 283808 - DNA, 25 bp, probe
tcagccaaggaagcttcaccagggt

SEQ ID NO: 283809 - DNA, 25 bp, probe
tcagatcaagagtcccttcactaca

SEQ ID NO: 283810 - DNA, 25 bp, probe
tcagatcaagagtcccttcactaca

SEQ ID NO: 283811 - DNA, 25 bp, probe
tcagtccaaacacctcaatgtccaa

SEQ ID NO: 283812 - DNA, 25 bp, probe
tcagtccaaacacctcaatgtccaa

SEQ ID NO: 283813 - DNA, 25 bp, probe
tcagacccagaatcaaatcccgaga

SEQ ID NO: 283814 - DNA, 25 bp, probe
tcagactggctgtgtcaaatccccg

SEQ ID NO: 283815 - DNA, 25 bp, probe
tcaggggcagctcatagagtccccc

SEQ ID NO: 283816 - DNA, 25 bp, probe
tcagtgcggtgctgaaagtaccccg

SEQ ID NO: 283817 - DNA, 25 bp, probe
tcaggctgagtgtggtggctcacgc

SEQ ID NO: 283818 - DNA, 25 bp, probe
tcagtcgcaagctgggtgccaggcc

SEQ ID NO: 283819 - DNA, 25 bp, probe
tcagctcctctgagggtccagagcc

SEQ ID NO: 283820 - DNA, 25 bp, probe
tcagctcctctgagggtccagagcc

SEQ ID NO: 283821 - DNA, 25 bp, probe
tcagctcctctgagggtccagagcc

SEQ ID NO: 283822 - DNA, 25 bp, probe
tcactatcatttgagagccctacct

SEQ ID NO: 283823 - DNA, 25 bp, probe
tcacattctttctaaccatggaccc

SEQ ID NO: 283824 - DNA, 25 bp, probe
tcagcacttaactatgagccaggca

SEQ ID NO: 283825 - DNA, 25 bp, probe
tcagctcctggttcatggaagccat

SEQ ID NO: 283826 - DNA, 25 bp, probe
tcagctcctggttcatggaagccat

SEQ ID NO: 283827 - DNA, 25 bp, probe
tcagtcacttgtttgcagaagcaat

SEQ ID NO: 283828 - DNA, 25 bp, probe
tcagtacatttgtctggctcacact

SEQ ID NO: 283829 - DNA, 25 bp, probe
tcagtacatttgtctggctcacact

SEQ ID NO: 283830 - DNA, 25 bp, probe
tcagctactttaggggacagtgtta

SEQ ID NO: 283831 - DNA, 25 bp, probe
tcagttttatagtgtgcaagtggca

SEQ ID NO: 283832 - DNA, 25 bp, probe
tcactttgacaatgggaatgaggag

SEQ ID NO: 283833 - DNA, 25 bp, probe
tcactgtaaagctggaaagggacga

SEQ ID NO: 283834 - DNA, 25 bp, probe
tatttagcaccagggaaggggacaa

SEQ ID NO: 283835 - DNA, 25 bp, probe
tcacggaactcatgcgcaaggggaa

SEQ ID NO: 283836 - DNA, 25 bp, probe
tcaggacagacctccatcaagagag

SEQ ID NO: 283837 - DNA, 25 bp, probe
tcagtacggctgtaccaatacaatg

SEQ ID NO: 283838 - DNA, 25 bp, probe
tcaggcaccgagaacctagcacgtg

SEQ ID NO: 283839 - DNA, 25 bp, probe
tcagagaccagtgacatgccagagg

SEQ ID NO: 283840 - DNA, 25 bp, probe
tcagttccaggctcatacagttgca

SEQ ID NO: 283841 - DNA, 25 bp, probe
tcaattctagtcttccaggattcac

SEQ ID NO: 283842 - DNA, 25 bp, probe
tcaattctagtcttccaggattcac

SEQ ID NO: 283843 - DNA, 25 bp, probe
tcacttctactctatttcagttcct

SEQ ID NO: 283844 - DNA, 25 bp, probe
tcacatttaatttttctttcttctt

SEQ ID NO: 283845 - DNA, 25 bp, probe
tcagcttccaattagtattctttta

SEQ ID NO: 283846 - DNA, 25 bp, probe
tcagcttccaattagtattctttta

SEQ ID NO: 283847 - DNA, 25 bp, probe
tcaggtccagatatggtttctccta

SEQ ID NO: 283848 - DNA, 25 bp, probe
tcaggggacatgagttttccagctt

SEQ ID NO: 283849 - DNA, 25 bp, probe
tcaggcgtggtggtcttttcacagc

SEQ ID NO: 283850 - DNA, 25 bp, probe
tcagcgccgagtggacttttgcaaa

SEQ ID NO: 283851 - DNA, 25 bp, probe
tcagccatgtagaccacgctttaaa

SEQ ID NO: 283852 - DNA, 25 bp, probe
tcagtttccacatcctatgtactag

SEQ ID NO: 283853 - DNA, 25 bp, probe
tcagtgtcctactcctggcaaggag

SEQ ID NO: 283854 - DNA, 25 bp, probe
tcaggacccacacgacgggaagaca

SEQ ID NO: 283855 - DNA, 25 bp, probe
tcaggacccacacgacgggaagaca

SEQ ID NO: 283856 - DNA, 25 bp, probe
tcaggacccacacgacgggaagaca

SEQ ID NO: 283857 - DNA, 25 bp, probe
tcaggaacgcctcgatacgctggaa

SEQ ID NO: 283858 - DNA, 25 bp, probe
tcagtcaacccttaccgcattgaag

SEQ ID NO: 283859 - DNA, 25 bp, probe
tcagatcaacttcaacccatggaga

SEQ ID NO: 283860 - DNA, 25 bp, probe
tcactcaacaaccaagcgcctggag

SEQ ID NO: 283861 - DNA, 25 bp, probe
tcacagaataatttcgccctgggtt

SEQ ID NO: 283862 - DNA, 25 bp, probe
tcacgtttatgcttctgaactcggg

SEQ ID NO: 283863 - DNA, 25 bp, probe
tcaccgatgattcctttccttggtg

SEQ ID NO: 283864 - DNA, 25 bp, probe
tcagccaggagtatttcctgtgcca

SEQ ID NO: 283865 - DNA, 25 bp, probe
tcaggagggcttgatgtcctcaccc

SEQ ID NO: 283866 - DNA, 25 bp, probe
tcaggagtgggttgatttcagcacc

SEQ ID NO: 283867 - DNA, 25 bp, probe
tcagggtggatcatgtgcttgagca

SEQ ID NO: 283868 - DNA, 25 bp, probe
tcagggtggatcatgtgcttgagca

SEQ ID NO: 283869 - DNA, 25 bp, probe
tcagcgtgtgaatggctctctggct

SEQ ID NO: 283870 - DNA, 25 bp, probe
tcagctataaattgcgctctcagct

SEQ ID NO: 283871 - DNA, 25 bp, probe
tcagaaatggttggcctgagcaacc

SEQ ID NO: 283872 - DNA, 25 bp, probe
tcagactatgagctcacctacaacc

SEQ ID NO: 283873 - DNA, 25 bp, probe
tcaggattgatcctcaccttcaaac

SEQ ID NO: 283874 - DNA, 25 bp, probe
tcaggttgtctgaagtcactgcaca

SEQ ID NO: 283875 - DNA, 25 bp, probe
tcaggtggtctggaggcagctccac

SEQ ID NO: 283876 - DNA, 25 bp, probe
tcagtgctgggcggagactgtctcc

SEQ ID NO: 283877 - DNA, 25 bp, probe
tcaggtgatcagcaggactgtctcc

SEQ ID NO: 283878 - DNA, 25 bp, probe
tcaggctgcttgaggccatgtgcca

SEQ ID NO: 283879 - DNA, 25 bp, probe
tcaggagctctgagtgccatagccc

SEQ ID NO: 283880 - DNA, 25 bp, probe
tcagggcctgatggggaacctacca

SEQ ID NO: 283881 - DNA, 25 bp, probe
tcacgcccggagtagaagcgcatac

SEQ ID NO: 283882 - DNA, 25 bp, probe
tcaccatccttatcatgaacctgca

SEQ ID NO: 283883 - DNA, 25 bp, probe
tcagcttagctgtcaactggaccac

SEQ ID NO: 283884 - DNA, 25 bp, probe
tcaggctcaacctactgacagccac

SEQ ID NO: 283885 - DNA, 25 bp, probe
tcagtgctgcactcaactatggaaa

SEQ ID NO: 283886 - DNA, 25 bp, probe
tcagtgctgcactcaactatggaaa

SEQ ID NO: 283887 - DNA, 25 bp, probe
tcagagtaaccagcaaggaagagaa

SEQ ID NO: 283888 - DNA, 25 bp, probe
tcagcctaaccaggagaggggagaa

SEQ ID NO: 283889 - DNA, 25 bp, probe
tcagccattacagtgggtggtggaa

SEQ ID NO: 283890 - DNA, 25 bp, probe
tcagccattacagtgggtggtggaa

SEQ ID NO: 283891 - DNA, 25 bp, probe
tcagctcactgagctgggtgtagga

SEQ ID NO: 283892 - DNA, 25 bp, probe
tcagccagctgaggtaactccagga

SEQ ID NO: 283893 - DNA, 25 bp, probe
tcagacagaggcgacttctgccagg

SEQ ID NO: 283894 - DNA, 25 bp, probe
tcaggaggtcaagtgtgcatgcaag

SEQ ID NO: 283895 - DNA, 25 bp, probe
tcaggactcatctgggcatgccagc

SEQ ID NO: 283896 - DNA, 25 bp, probe
tcaggactcatctgggcatgccagc

SEQ ID NO: 283897 - DNA, 25 bp, probe
tcaggtcactgctgtggttgcagcc

SEQ ID NO: 283898 - DNA, 25 bp, probe
tcagtggcacctagaggcttggcac

SEQ ID NO: 283899 - DNA, 25 bp, probe
tcagctgcaggctttgagtttctca

SEQ ID NO: 283900 - DNA, 25 bp, probe
tcagcatgacgcttgggtgtttagc

SEQ ID NO: 283901 - DNA, 25 bp, probe
tcagcacaccaatggtgtcaatggc

SEQ ID NO: 283902 - DNA, 25 bp, probe
tcagagccccgaagcagctaatgta

SEQ ID NO: 283903 - DNA, 25 bp, probe
tcagagcccatgaagcccaagatgc

SEQ ID NO: 283904 - DNA, 25 bp, probe
tcagcaggccactgctacaagtccc

SEQ ID NO: 283905 - DNA, 25 bp, probe
tcagggcatgtgttcaacaaccccc

SEQ ID NO: 283906 - DNA, 25 bp, probe
tcacggctgtaccagaaaatcccta

SEQ ID NO: 283907 - DNA, 25 bp, probe
tcagaatctgtcggccaaaagcggt

SEQ ID NO: 283908 - DNA, 25 bp, probe
tcagcgattcctgccaagtagggtt

SEQ ID NO: 283909 - DNA, 25 bp, probe
tcagagtgattctccaacgggcgtt

SEQ ID NO: 283910 - DNA, 25 bp, probe
taggtcccatgtcaacactggttca

SEQ ID NO: 283911 - DNA, 25 bp, probe
tcagcctccttgtgcaaactgggcc

SEQ ID NO: 283912 - DNA, 25 bp, probe
tcactgtgcctttccaaacggattg

SEQ ID NO: 283913 - DNA, 25 bp, probe
tcactgtccttaagacggcaggaag

SEQ ID NO: 283914 - DNA, 25 bp, probe
tcaggtcagcagaaggacggcaaaa

SEQ ID NO: 283915 - DNA, 25 bp, probe
tcaggacagcaactgggccagcaaa

SEQ ID NO: 283916 - DNA, 25 bp, probe
tcaggatcagcttggacatgcccat

SEQ ID NO: 283917 - DNA, 25 bp, probe
tcagcagcttgcgggagatcacgct

SEQ ID NO: 283918 - DNA, 25 bp, probe
tcagtgcatctggtggcaacagctc

SEQ ID NO: 283919 - DNA, 25 bp, probe
tcagctacatcgctcgacagctgca

SEQ ID NO: 283920 - DNA, 25 bp, probe
tcacttcattgaccaggatgatcac

SEQ ID NO: 283921 - DNA, 25 bp, probe
tcagatccagagtccagcaggtcag

SEQ ID NO: 283922 - DNA, 25 bp, probe
tcagatctgcagacccaaagccagc

SEQ ID NO: 283923 - DNA, 25 bp, probe
tcagtctatagcgcaaaccacacac

SEQ ID NO: 283924 - DNA, 25 bp, probe
tcagtctctactggattagccctac

SEQ ID NO: 283925 - DNA, 25 bp, probe
tcagttctacttatgacacctcact

SEQ ID NO: 283926 - DNA, 25 bp, probe
tcagtttgaattttgacagctattc

SEQ ID NO: 283927 - DNA, 25 bp, probe
tcagtttatcatcgttgactctttg

SEQ ID NO: 283928 - DNA, 25 bp, probe
tcaggtctgaatcttcaccatcttt

SEQ ID NO: 283929 - DNA, 25 bp, probe
tcagcttcataactttcccatggat

SEQ ID NO: 283930 - DNA, 25 bp, probe
tcagttgctaagtatttcatatgta

SEQ ID NO: 283931 - DNA, 25 bp, probe
tcagttgctaagtatttcatatgta

SEQ ID NO: 283932 - DNA, 25 bp, probe
tcagttctctagcataatttgtatt

SEQ ID NO: 283933 - DNA, 25 bp, probe
tcagtatactagcaccttgatttca

SEQ ID NO: 283934 - DNA, 25 bp, probe
tcagatatactggaacccttttaaa

SEQ ID NO: 283935 - DNA, 25 bp, probe
tcagtagcttgaaaccacaatttta

SEQ ID NO: 283936 - DNA, 25 bp, probe
tcagtgacctcagtagcctcaaatc

SEQ ID NO: 283937 - DNA, 25 bp, probe
tcagtgatcctattcagcagatatt

SEQ ID NO: 283938 - DNA, 25 bp, probe
tcagtgatccatgcatagaatatga

SEQ ID NO: 283939 - DNA, 25 bp, probe
tcagtgatccatgcatagaatatga

SEQ ID NO: 283940 - DNA, 25 bp, probe
tcagctattatgccaggttctgaaa

SEQ ID NO: 283941 - DNA, 25 bp, probe
tcagtattgctgtccgcttctagaa

SEQ ID NO: 283942 - DNA, 25 bp, probe
tcagtattgctgtccgcttctagaa

SEQ ID NO: 283943 - DNA, 25 bp, probe
tcagtattgctgtccgcttctagaa

SEQ ID NO: 283944 - DNA, 25 bp, probe
tcagcatacttcttgctgctttcag

SEQ ID NO: 283945 - DNA, 25 bp, probe
tcagttgtctcagctgatttcagac

SEQ ID NO: 283946 - DNA, 25 bp, probe
tcagtcttccatgtcagagtcacct

SEQ ID NO: 283947 - DNA, 25 bp, probe
tcagtcttccatgtcagagtcacct

SEQ ID NO: 283948 - DNA, 25 bp, probe
tcagctcaatacagtgcacaatcag

SEQ ID NO: 283949 - DNA, 25 bp, probe
tcagtacaacagaagcagcaacagc

SEQ ID NO: 283950 - DNA, 25 bp, probe
tcagtacaacagaagcagcaacagc

SEQ ID NO: 283951 - DNA, 25 bp, probe
tcagatcacaaccatcagcatcacg

SEQ ID NO: 283952 - DNA, 25 bp, probe
tcagatcacaaccatcagcatcacg

SEQ ID NO: 283953 - DNA, 25 bp, probe
tcagatatcttcctcaatgagctgg

SEQ ID NO: 283954 - DNA, 25 bp, probe
tcagtgcatttcctcttgatttgtc

SEQ ID NO: 283955 - DNA, 25 bp, probe
tcagtgatttcagattgtttgtttc

SEQ ID NO: 283956 - DNA, 25 bp, probe
tagtgttctaaaatttggttacttg

SEQ ID NO: 283957 - DNA, 25 bp, probe
tcagtggtcttatttttgggtgatt

SEQ ID NO: 283958 - DNA, 25 bp, probe
tcagtggtgcctgcatttataatta

SEQ ID NO: 283959 - DNA, 25 bp, probe
tcaggatctcttagcattttaatta

SEQ ID NO: 283960 - DNA, 25 bp, probe
tcagagttcttgcctattaaaattt

SEQ ID NO: 283961 - DNA, 25 bp, probe
tcagagtatttgcccattagatatg

SEQ ID NO: 283962 - DNA, 25 bp, probe
tcagatgtgcatttcacctgtgaca

SEQ ID NO: 283963 - DNA, 25 bp, probe
tcagcatcagtatatcccatgcaat

SEQ ID NO: 283964 - DNA, 25 bp, probe
tcagcacactcacatgctgcgcaca

SEQ ID NO: 283965 - DNA, 25 bp, probe
tcagcacactcacatgctgcgcaca

SEQ ID NO: 283966 - DNA, 25 bp, probe
tcaccatcacagcgctgagcgtcga

SEQ ID NO: 283967 - DNA, 25 bp, probe
tcaccataatcatctggcttttctt

SEQ ID NO: 283968 - DNA, 25 bp, probe
tcagacttatcaccattcttatgtc

SEQ ID NO: 283969 - DNA, 25 bp, probe
tcacctgtcacagacactttgtccc

SEQ ID NO: 283970 - DNA, 25 bp, probe
tcactttgacagaaactcatgcttc

SEQ ID NO: 283971 - DNA, 25 bp, probe
tcactttgacagaaactcatgcttc

SEQ ID NO: 283972 - DNA, 25 bp, probe
tcagtgcttgactccacactgctga

SEQ ID NO: 283973 - DNA, 25 bp, probe
tcagtcaccaacggcaatggcatga

SEQ ID NO: 283974 - DNA, 25 bp, probe
tcagctccatgaacagcggcaggag

SEQ ID NO: 283975 - DNA, 25 bp, probe
tcagttatttgcagaagggaaccga

SEQ ID NO: 283976 - DNA, 25 bp, probe
tcagcctatttgcttagtgaaacat

SEQ ID NO: 283977 - DNA, 25 bp, probe
tcagctctgattgagtttgccacag

SEQ ID NO: 283978 - DNA, 25 bp, probe
tcagctctgattgagtttgccacag

SEQ ID NO: 283979 - DNA, 25 bp, probe
tcagcattatctctgagtccaccag

SEQ ID NO: 283980 - DNA, 25 bp, probe
tcagcaatatcctttgacaactcag

SEQ ID NO: 283981 - DNA, 25 bp, probe
tcagctattactttgaccactcttc

SEQ ID NO: 283982 - DNA, 25 bp, probe
tcagcgagggcttctactttgcttt

SEQ ID NO: 283983 - DNA, 25 bp, probe
tcacgaggcccctagctttgaaaag

SEQ ID NO: 283984 - DNA, 25 bp, probe
tcaccagcgcacacgctgatttgaa

SEQ ID NO: 283985 - DNA, 25 bp, probe
tcaccagcgcggactatgtatttca

SEQ ID NO: 283986 - DNA, 25 bp, probe
tcacccgagtcatgcatttcttgag

SEQ ID NO: 283987 - DNA, 25 bp, probe
tcacctctgattatgctttcctaat

SEQ ID NO: 283988 - DNA, 25 bp, probe
tcacctctgattatgctttcctaat

SEQ ID NO: 283989 - DNA, 25 bp, probe
tcaacacaagttatttacttaaaag

SEQ ID NO: 283990 - DNA, 25 bp, probe
taacaaagtaacacttcttttcaag

SEQ ID NO: 283991 - DNA, 25 bp, probe
tcaagaaactaagccgtccttttca

SEQ ID NO: 283992 - DNA, 25 bp, probe
tcacgaaacaaatcccctgtgtccc

SEQ ID NO: 283993 - DNA, 25 bp, probe
tcagccaggacattaggaccacttg

SEQ ID NO: 283994 - DNA, 25 bp, probe
tcagcacggacagttgggcaccaat

SEQ ID NO: 283995 - DNA, 25 bp, probe
tcagctgggacagtggggacccagg

SEQ ID NO: 283996 - DNA, 25 bp, probe
tcaggggacagcttgtgtcaccacg

SEQ ID NO: 283997 - DNA, 25 bp, probe
tcagcttggaacttttttcctgggt

SEQ ID NO: 283998 - DNA, 25 bp, probe
tcagtggcgatgactttatttgcgg

SEQ ID NO: 283999 - DNA, 25 bp, probe
tcagtggtgcgcagggcatttggga

SEQ ID NO: 284000 - DNA, 25 bp, probe
tcagtggtgcgcagggcatttggga

SEQ ID NO: 284001 - DNA, 25 bp, probe
tcagggacagggcatcatgggggat

SEQ ID NO: 284002 - DNA, 25 bp, probe
tcacggcacgggacaatgagggggc

SEQ ID NO: 284003 - DNA, 25 bp, probe
tcacggcacgggacaatgagggggc

SEQ ID NO: 284004 - DNA, 25 bp, probe
tcagcctctcagcaaaatgggaggg

SEQ ID NO: 284005 - DNA, 25 bp, probe
tcagtcctgagccctacatgtgggg

SEQ ID NO: 284006 - DNA, 25 bp, probe
tcacagccttctgctacgtgggctg

SEQ ID NO: 284007 - DNA, 25 bp, probe
tcacagccttctgctacgtgggctg

SEQ ID NO: 284008 - DNA, 25 bp, probe
tcactgcccattgctaagcgaggtt

SEQ ID NO: 284009 - DNA, 25 bp, probe
tcaccagccacagttaagccaagcc

SEQ ID NO: 284010 - DNA, 25 bp, probe
tcaccagcgagaacaaacacctccc

SEQ ID NO: 284011 - DNA, 25 bp, probe
tcaccctgagaacaaacccagatgc

SEQ ID NO: 284012 - DNA, 25 bp, probe
tcacctggagcatgaaaaccactag

SEQ ID NO: 284013 - DNA, 25 bp, probe
tcacctggagcatgaaaaccactag

SEQ ID NO: 284014 - DNA, 25 bp, probe
tacctggctcggctcaaggaaagcc

SEQ ID NO: 284015 - DNA, 25 bp, probe
tcaccaggctcctattgaaggaacc

SEQ ID NO: 284016 - DNA, 25 bp, probe
tcagccaggcctttctgaaggagtt

SEQ ID NO: 284017 - DNA, 25 bp, probe
tcagaatgacccttgatgtcagggc

SEQ ID NO: 284018 - DNA, 25 bp, probe
tcaacaaccagcagttcctggcagg

SEQ ID NO: 284019 - DNA, 25 bp, probe
tcaccaacacagtgcttgattccaa

SEQ ID NO: 284020 - DNA, 25 bp, probe
tcagctcccaagtttagttcaggaa

SEQ ID NO: 284021 - DNA, 25 bp, probe
tcagccccaaagagattgtccagaa

SEQ ID NO: 284022 - DNA, 25 bp, probe
tcacgccccaacaaggactgttgaa

SEQ ID NO: 284023 - DNA, 25 bp, probe
tcagcacccctagcatgaacttgtg

SEQ ID NO: 284024 - DNA, 25 bp, probe
tcagcacccactccaataacagagt

SEQ ID NO: 284025 - DNA, 25 bp, probe
tcagacatgatcctccagattgaca

SEQ ID NO: 284026 - DNA, 25 bp, probe
tcagccagcaggtccagaaacaata

SEQ ID NO: 284027 - DNA, 25 bp, probe
tcagccagcaggtccagaaacaata

SEQ ID NO: 284028 - DNA, 25 bp, probe
tcagccgggtgcaatgactcatgcc

SEQ ID NO: 284029 - DNA, 25 bp, probe
tcagccagacgagcgagctggccaa

SEQ ID NO: 284030 - DNA, 25 bp, probe
tcagctcaaagggcaatcgggaagg

SEQ ID NO: 284031 - DNA, 25 bp, probe
tcagctcaagagatgccttaagata

SEQ ID NO: 284032 - DNA, 25 bp, probe
tcactacacatgttgccccaaatac

SEQ ID NO: 284033 - DNA, 25 bp, probe
tcactcccatttcctagcaaaatca

SEQ ID NO: 284034 - DNA, 25 bp, probe
tcactccttttctatgcagaaaaat

SEQ ID NO: 284035 - DNA, 25 bp, probe
tcaccctctttgtacaaccagtatg

SEQ ID NO: 284036 - DNA, 25 bp, probe
tcaccctctttgtacaaccagtatg

SEQ ID NO: 284037 - DNA, 25 bp, probe
taccagactttcttcaatccgagga

SEQ ID NO: 284038 - DNA, 25 bp, probe
tattaagtattctctagcggaccag

SEQ ID NO: 284039 - DNA, 25 bp, probe
tagtcacaggtttttacagtccagc

SEQ ID NO: 284040 - DNA, 25 bp, probe
tcaccagaggtatgttacagtccac

SEQ ID NO: 284041 - DNA, 25 bp, probe
tcaccaacaaatggtttcaacccat

SEQ ID NO: 284042 - DNA, 25 bp, probe
tcaccccagaatagttaaactctat

SEQ ID NO: 284043 - DNA, 25 bp, probe
tcacaacccagaagtaaccaccttt

SEQ ID NO: 284044 - DNA, 25 bp, probe
tcaaaccctgaagtgatccgagctc

SEQ ID NO: 284045 - DNA, 25 bp, probe
tcaaccgcacgacggacgtgacgca

SEQ ID NO: 284046 - DNA, 25 bp, probe
tcagacccggaatccagtgggcaga

SEQ ID NO: 284047 - DNA, 25 bp, probe
tcaccctgacgatgaccggggagaa

SEQ ID NO: 284048 - DNA, 25 bp, probe
tcagccacaacataacggggagagc

SEQ ID NO: 284049 - DNA, 25 bp, probe
tcagccacaacataacggggagagc

SEQ ID NO: 284050 - DNA, 25 bp, probe
tcacccagaacctcgtggtgaggcc

SEQ ID NO: 284051 - DNA, 25 bp, probe
tcacccaggccctggctaatgggcc

SEQ ID NO: 284052 - DNA, 25 bp, probe
tcacccaggccctggctaatgggcc

SEQ ID NO: 284053 - DNA, 25 bp, probe
tcaaaagggctatgggaagggcaga

SEQ ID NO: 284054 - DNA, 25 bp, probe
tactacgggtacctgtggagcgagg

SEQ ID NO: 284055 - DNA, 25 bp, probe
tactacgggtacctgtggagcgagg

SEQ ID NO: 284056 - DNA, 25 bp, probe
tcactccagggcacggcgtgggagg

SEQ ID NO: 284057 - DNA, 25 bp, probe
tcactccgaagccagcggcatggtg

SEQ ID NO: 284058 - DNA, 25 bp, probe
tcagacctgccacagggcagagcag

SEQ ID NO: 284059 - DNA, 25 bp, probe
tcagaactgcctctgagctgggcag

SEQ ID NO: 284060 - DNA, 25 bp, probe
tcagagcgtcctgtgcactgaggag

SEQ ID NO: 284061 - DNA, 25 bp, probe
tcagaagaccaggctacaaggtgtt

SEQ ID NO: 284062 - DNA, 25 bp, probe
tcagaatcaacatctcacacaactt

SEQ ID NO: 284063 - DNA, 25 bp, probe
tcagcagatcaaacatctggaaatt

SEQ ID NO: 284064 - DNA, 25 bp, probe
tcacagtacaccatggtctttcacc

SEQ ID NO: 284065 - DNA, 25 bp, probe
taattagcaggctggtctaccactg

SEQ ID NO: 284066 - DNA, 25 bp, probe
tcaattcggtacgcactagccacat

SEQ ID NO: 284067 - DNA, 25 bp, probe
tcagtcagctggaggtactgcagcc

SEQ ID NO: 284068 - DNA, 25 bp, probe
tcagcatccaggagggcttcatcct

SEQ ID NO: 284069 - DNA, 25 bp, probe
tcagccctggatacgtcttgtaatc

SEQ ID NO: 284070 - DNA, 25 bp, probe
tcagttcttgtgtcgtttgtgaaag

SEQ ID NO: 284071 - DNA, 25 bp, probe
tcagttctgtggtgcatctgagcca

SEQ ID NO: 284072 - DNA, 25 bp, probe
tcacttacgcgggcattgatgccac

SEQ ID NO: 284073 - DNA, 25 bp, probe
tcactatacggtgtggccagaccat

SEQ ID NO: 284074 - DNA, 25 bp, probe
tcagcctaggggatggcgagccctg

SEQ ID NO: 284075 - DNA, 25 bp, probe
tcaccaagcggagacgcaaggcctg

SEQ ID NO: 284076 - DNA, 25 bp, probe
tcacaccttataggccctaggcctg

SEQ ID NO: 284077 - DNA, 25 bp, probe
tcactacattattccacctactttg

SEQ ID NO: 284078 - DNA, 25 bp, probe
tcagaaatgtattctgcacccccgg

SEQ ID NO: 284079 - DNA, 25 bp, probe
tcagacagatgtggttgcatcctaa

SEQ ID NO: 284080 - DNA, 25 bp, probe
tcagacagtgttgatgaggcatgaa

SEQ ID NO: 284081 - DNA, 25 bp, probe
tcagcttggcctctgagtgcacaac

SEQ ID NO: 284082 - DNA, 25 bp, probe
tcagctatgctggctgtgtggccca

SEQ ID NO: 284083 - DNA, 25 bp, probe
tcagccatcggtctagcatatcagt

SEQ ID NO: 284084 - DNA, 25 bp, probe
tcagccatcggtctagcatatcagt

SEQ ID NO: 284085 - DNA, 25 bp, probe
tcagccttggtcagaatgctcagct

SEQ ID NO: 284086 - DNA, 25 bp, probe
tcagccattgcagtgattaatccca

SEQ ID NO: 284087 - DNA, 25 bp, probe
tcagcctacagttatgttcagtcac

SEQ ID NO: 284088 - DNA, 25 bp, probe
tcagcgaacgtggcattttctgcgc

SEQ ID NO: 284089 - DNA, 25 bp, probe
tcagtgaaggtggtggggctgccgg

SEQ ID NO: 284090 - DNA, 25 bp, probe
tcagtggaggagatccctgtgcctg

SEQ ID NO: 284091 - DNA, 25 bp, probe
tcactggcatggccttccgtgtccc

SEQ ID NO: 284092 - DNA, 25 bp, probe
tcactacgtctgccacatcaagaaa

SEQ ID NO: 284093 - DNA, 25 bp, probe
tcagctacgtcaacagctgcctcaa

SEQ ID NO: 284094 - DNA, 25 bp, probe
tcagtatggctcaaccagccatcta

SEQ ID NO: 284095 - DNA, 25 bp, probe
tcagtctttcattcatagcctgcta

SEQ ID NO: 284096 - DNA, 25 bp, probe
tcagttcattgtttgccctgctagg

SEQ ID NO: 284097 - DNA, 25 bp, probe
tcagtgtcttacacccagctgaggt

SEQ ID NO: 284098 - DNA, 25 bp, probe
tcagtgccatgttcgacttcagcga

SEQ ID NO: 284099 - DNA, 25 bp, probe
tcactcgctgctttgagcattacga

SEQ ID NO: 284100 - DNA, 25 bp, probe
tcaccagcactgctcacttaggact

SEQ ID NO: 284101 - DNA, 25 bp, probe
tcacaagcctgtcagcctaagacct

SEQ ID NO: 284102 - DNA, 25 bp, probe
tcacaagcctgtcagcctaagacct

SEQ ID NO: 284103 - DNA, 25 bp, probe
tcaagacctttacctcagaattatg

SEQ ID NO: 284104 - DNA, 25 bp, probe
tcaaagctcttttcctaactggtta

SEQ ID NO: 284105 - DNA, 25 bp, probe
tcaccagtgcctattttactggctt

SEQ ID NO: 284106 - DNA, 25 bp, probe
tcaccaagccttttcataatcaagt

SEQ ID NO: 284107 - DNA, 25 bp, probe
tcagcctcgtctctttacagaagta

SEQ ID NO: 284108 - DNA, 25 bp, probe
tcacctctggcaagtattactggga

SEQ ID NO: 284109 - DNA, 25 bp, probe
tcacgtgcggttcattgactatgaa

SEQ ID NO: 284110 - DNA, 25 bp, probe
tcaccttgtgttcctaatctaaact

SEQ ID NO: 284111 - DNA, 25 bp, probe
tcacctcagtgctgcactcaactat

SEQ ID NO: 284112 - DNA, 25 bp, probe
tcacctcagtgctgcactcaactat

SEQ ID NO: 284113 - DNA, 25 bp, probe
tcacccctgcaagctcaaattcagt

SEQ ID NO: 284114 - DNA, 25 bp, probe
tcagaagttcaagctaaatattgtt

SEQ ID NO: 284115 - DNA, 25 bp, probe
tcagcaagttcacctccaagtttgt

SEQ ID NO: 284116 - DNA, 25 bp, probe
tcagcaagttcacctccaagtttgt

SEQ ID NO: 284117 - DNA, 25 bp, probe
tcagaagtaatcctgagaaatgttt

SEQ ID NO: 284118 - DNA, 25 bp, probe
tcaaattcaatcaggaaagccttag

SEQ ID NO: 284119 - DNA, 25 bp, probe
tacaattcctttggaagggctacga

SEQ ID NO: 284120 - DNA, 25 bp, probe
tacaattcctttggaagggctacga

SEQ ID NO: 284121 - DNA, 25 bp, probe
tcagcacctactttgaaagggctac

SEQ ID NO: 284122 - DNA, 25 bp, probe
tcagcacctactttgaaagggctac

SEQ ID NO: 284123 - DNA, 25 bp, probe
tcaccctacatgaatccaaaggaac

SEQ ID NO: 284124 - DNA, 25 bp, probe
tcagtccttatgaatggcacttgga

SEQ ID NO: 284125 - DNA, 25 bp, probe
tcactgccttacagccacattggca

SEQ ID NO: 284126 - DNA, 25 bp, probe
tcacactgttactccacagcggagg

SEQ ID NO: 284127 - DNA, 25 bp, probe
tcacactgttactccacagcggagg

SEQ ID NO: 284128 - DNA, 25 bp, probe
tcacaggttactttccagaaaggtt

SEQ ID NO: 284129 - DNA, 25 bp, probe
tcacagtggtcgcacctggaaagga

SEQ ID NO: 284130 - DNA, 25 bp, probe
tacagtgtgtcccacgggaacctgg

SEQ ID NO: 284131 - DNA, 25 bp, probe
tcacgtggactcccagtgcgaaggg

SEQ ID NO: 284132 - DNA, 25 bp, probe
tcaccttcactcacagtctgagttc

SEQ ID NO: 284133 - DNA, 25 bp, probe
tcacctatgaccacattgggcccaa

SEQ ID NO: 284134 - DNA, 25 bp, probe
tcacctgtgtcccatagggtgcctt

SEQ ID NO: 284135 - DNA, 25 bp, probe
tcaccttccacaagctggtggccta

SEQ ID NO: 284136 - DNA, 25 bp, probe
tcactggtgcccggagcagtggcca

SEQ ID NO: 284137 - DNA, 25 bp, probe
tcacgccgcccatgaagatggtgac

SEQ ID NO: 284138 - DNA, 25 bp, probe
tcagagcccctctagcagagtgggg

SEQ ID NO: 284139 - DNA, 25 bp, probe
tcagacctcactgggcggcaagagg

SEQ ID NO: 284140 - DNA, 25 bp, probe
tcagactgatgatttggctaaagag

SEQ ID NO: 284141 - DNA, 25 bp, probe
tcagagtgagttttctatggagcct

SEQ ID NO: 284142 - DNA, 25 bp, probe
tcagttcatgctcttctgtgtacct

SEQ ID NO: 284143 - DNA, 25 bp, probe
tcagttctgtccatgtgggagaccc

SEQ ID NO: 284144 - DNA, 25 bp, probe
tcagaaggtcatcagattgtgagac

SEQ ID NO: 284145 - DNA, 25 bp, probe
tcagacatgttgagaatcatggaca

SEQ ID NO: 284146 - DNA, 25 bp, probe
tcagagcatttgtaaggcaggagaa

SEQ ID NO: 284147 - DNA, 25 bp, probe
tcagatggggattacggggaaggga

SEQ ID NO: 284148 - DNA, 25 bp, probe
tcagatgggaattgcacagtaggat

SEQ ID NO: 284149 - DNA, 25 bp, probe
tcagcagagagcatcccgtgtggat

SEQ ID NO: 284150 - DNA, 25 bp, probe
tcagcatgggcttagagctggcatg

SEQ ID NO: 284151 - DNA, 25 bp, probe
tcagcatcagcctgcagagggctga

SEQ ID NO: 284152 - DNA, 25 bp, probe
tcagatgatgcgggagtgctggtac

SEQ ID NO: 284153 - DNA, 25 bp, probe
tcagtctgaggcaaggctgtggagc

SEQ ID NO: 284154 - DNA, 25 bp, probe
tcagctctgggcaacttgggacctg

SEQ ID NO: 284155 - DNA, 25 bp, probe
tcagctgtgtcgcacttaaactgga

SEQ ID NO: 284156 - DNA, 25 bp, probe
tcagcttgccctgttaaaagatgaa

SEQ ID NO: 284157 - DNA, 25 bp, probe
tcactgcaccctggatttgcataca

SEQ ID NO: 284158 - DNA, 25 bp, probe
tcaccctccgctattcaacagggac

SEQ ID NO: 284159 - DNA, 25 bp, probe
tcagcggctaccaaagccaagcacc

SEQ ID NO: 284160 - DNA, 25 bp, probe
tcagcttcaacaaaaccatgaccca

SEQ ID NO: 284161 - DNA, 25 bp, probe
tcagcttcagtcaacaccgagacca

SEQ ID NO: 284162 - DNA, 25 bp, probe
tcagcattcactaaccctgtttagc

SEQ ID NO: 284163 - DNA, 25 bp, probe
tcagcgtcctcaatgtccttaagag

SEQ ID NO: 284164 - DNA, 25 bp, probe
tcagagacctcagactcttcacagg

SEQ ID NO: 284165 - DNA, 25 bp, probe
tcagaaggaagttgtctataatgag

SEQ ID NO: 284166 - DNA, 25 bp, probe
tcagaatgggatcttctgcaactga

SEQ ID NO: 284167 - DNA, 25 bp, probe
tcagaatgggatcttctgcaactga

SEQ ID NO: 284168 - DNA, 25 bp, probe
tcagaaggattcctatgtgggcgac

SEQ ID NO: 284169 - DNA, 25 bp, probe
tcagtatggttcttcagtcgatata

SEQ ID NO: 284170 - DNA, 25 bp, probe
tcagaagtgctggttagatagtaaa

SEQ ID NO: 284171 - DNA, 25 bp, probe
tcagaagtgctggttagatagtaaa

SEQ ID NO: 284172 - DNA, 25 bp, probe
tcagatgttcatgaattgagagtaa

SEQ ID NO: 284173 - DNA, 25 bp, probe
tcagattgtaaaggtaggtgcatgc

SEQ ID NO: 284174 - DNA, 25 bp, probe
tcagcatattaccaggggtttggcc

SEQ ID NO: 284175 - DNA, 25 bp, probe
tcagttccacacggggtttgtgcct

SEQ ID NO: 284176 - DNA, 25 bp, probe
tcagttccacacggggtttgtgcct

SEQ ID NO: 284177 - DNA, 25 bp, probe
tcactcccaccgcaggatttgggct

SEQ ID NO: 284178 - DNA, 25 bp, probe
tcacgctcctccaggagtttgggga

SEQ ID NO: 284179 - DNA, 25 bp, probe
tcactggccaggtgggttttgtgga

SEQ ID NO: 284180 - DNA, 25 bp, probe
tcagcgggaggaggggcttgggggc

SEQ ID NO: 284181 - DNA, 25 bp, probe
tcactgttgggggcaagatcgtggg

SEQ ID NO: 284182 - DNA, 25 bp, probe
tcagctggctgttggcagaagccgt

SEQ ID NO: 284183 - DNA, 25 bp, probe
tcactcacagtctgagttcttgtcc

SEQ ID NO: 284184 - DNA, 25 bp, probe
tcaccactgctaagggactctatcc

SEQ ID NO: 284185 - DNA, 25 bp, probe
tcaccgaaagagagcgcctatctca

SEQ ID NO: 284186 - DNA, 25 bp, probe
tcaccgaaaacggcgtgcatggcat

SEQ ID NO: 284187 - DNA, 25 bp, probe
tcaccaaagaactgcattgctgtgg

SEQ ID NO: 284188 - DNA, 25 bp, probe
tcaccaaagacatggtctgtgcagg

SEQ ID NO: 284189 - DNA, 25 bp, probe
tcacccaggcactggacgtcacaga

SEQ ID NO: 284190 - DNA, 25 bp, probe
tcagcccacgcgggaagttcaaagt

SEQ ID NO: 284191 - DNA, 25 bp, probe
tcagccctgctgttgtaatgtaaaa

SEQ ID NO: 284192 - DNA, 25 bp, probe
tcacctgtggcacggaatgaaaaca

SEQ ID NO: 284193 - DNA, 25 bp, probe
tcagcttggacatgcccattacaaa

SEQ ID NO: 284194 - DNA, 25 bp, probe
tcactatgtgactgcctttacggtt

SEQ ID NO: 284195 - DNA, 25 bp, probe
tcagctgccatagctgccttttagg

SEQ ID NO: 284196 - DNA, 25 bp, probe
tcagctccagaattccttgtctctg

SEQ ID NO: 284197 - DNA, 25 bp, probe
tcacctcaacttcttcacattaaaa

SEQ ID NO: 284198 - DNA, 25 bp, probe
tcaagatcaacctgtcccttttaac

SEQ ID NO: 284199 - DNA, 25 bp, probe
tcagatatcaagtcttttgcacttt

SEQ ID NO: 284200 - DNA, 25 bp, probe
tcagcattccagccaatattggatc

SEQ ID NO: 284201 - DNA, 25 bp, probe
tcagaatacagcccagttggatcag

SEQ ID NO: 284202 - DNA, 25 bp, probe
tcagaagatcattaagttggaatat

SEQ ID NO: 284203 - DNA, 25 bp, probe
tcagaagctctgtgtttgggaaact

SEQ ID NO: 284204 - DNA, 25 bp, probe
tcagagcgccgaggagagtgggaaa

SEQ ID NO: 284205 - DNA, 25 bp, probe
tcagacggctgacgaggagaggaca

SEQ ID NO: 284206 - DNA, 25 bp, probe
tcagcatcggcatctgcagtgatga

SEQ ID NO: 284207 - DNA, 25 bp, probe
tcagcatcggcatctgcagtgatga

SEQ ID NO: 284208 - DNA, 25 bp, probe
tcagctgcctcaactggtagacgct

SEQ ID NO: 284209 - DNA, 25 bp, probe
tcagcatccacaactacaaatcact

SEQ ID NO: 284210 - DNA, 25 bp, probe
tcagacacatgcagtcaaactcact

SEQ ID NO: 284211 - DNA, 25 bp, probe
tcacaacatttgtgaacttccccct

SEQ ID NO: 284212 - DNA, 25 bp, probe
tactctataatgtgaactttcccct

SEQ ID NO: 284213 - DNA, 25 bp, probe
tcagctgtgaacatggactcttccc

SEQ ID NO: 284214 - DNA, 25 bp, probe
tcagcgcaatacttgaaccttctcc

SEQ ID NO: 284215 - DNA, 25 bp, probe
tcagcagcaacctgagaactgttcc

SEQ ID NO: 284216 - DNA, 25 bp, probe
tcagcagcaacctgagaactgttcc

SEQ ID NO: 284217 - DNA, 25 bp, probe
tcaacaactcagcgagaagtttgga

SEQ ID NO: 284218 - DNA, 25 bp, probe
tcaacaactcagcgagaagtttgga

SEQ ID NO: 284219 - DNA, 25 bp, probe
tcaagctaccagctttgtttttggc

SEQ ID NO: 284220 - DNA, 25 bp, probe
tcagcagttccctattattctgatt

SEQ ID NO: 284221 - DNA, 25 bp, probe
tcagatgtttccaagatgtcccatt

SEQ ID NO: 284222 - DNA, 25 bp, probe
tcagatgctgtgaaccagatttcct

SEQ ID NO: 284223 - DNA, 25 bp, probe
tcagcactgatgtacccaacttata

SEQ ID NO: 284224 - DNA, 25 bp, probe
tcagcactgttacaattcttcaaaa

SEQ ID NO: 284225 - DNA, 25 bp, probe
tcagcaattctgaacaagcctctca

SEQ ID NO: 284226 - DNA, 25 bp, probe
tcagccgtctcaacaacaggcatca

SEQ ID NO: 284227 - DNA, 25 bp, probe
tcagccgtctcaacaacaggcatca

SEQ ID NO: 284228 - DNA, 25 bp, probe
tcagcacttgctaccagagaggaca

SEQ ID NO: 284229 - DNA, 25 bp, probe
tcagcagcttctacctggacataca

SEQ ID NO: 284230 - DNA, 25 bp, probe
tcagcatttccaacaggatcacaga

SEQ ID NO: 284231 - DNA, 25 bp, probe
tcagcttcttcaggcggtagctgat

SEQ ID NO: 284232 - DNA, 25 bp, probe
tcagatcattttagcttgttgctga

SEQ ID NO: 284233 - DNA, 25 bp, probe
tcagatactcgtggctttgcggcac

SEQ ID NO: 284234 - DNA, 25 bp, probe
tcagaagtgctgtctctttgtgtcc

SEQ ID NO: 284235 - DNA, 25 bp, probe
tcagagagtgtgagctactggccca

SEQ ID NO: 284236 - DNA, 25 bp, probe
tcagaagttgacctttgcactggca

SEQ ID NO: 284237 - DNA, 25 bp, probe
tcagaaatcaagcctgtcacattgc

SEQ ID NO: 284238 - DNA, 25 bp, probe
tcagaaatcaagcctgtcacattgc

SEQ ID NO: 284239 - DNA, 25 bp, probe
tcaaatactggcctgatgagtatgc

SEQ ID NO: 284240 - DNA, 25 bp, probe
tcagaagacatgcctggagggatgt

SEQ ID NO: 284241 - DNA, 25 bp, probe
tcagaggccagcctggggagctctg

SEQ ID NO: 284242 - DNA, 25 bp, probe
tcacctgacagccgagggacacgag

SEQ ID NO: 284243 - DNA, 25 bp, probe
tcagcgcgcaagagggcagaccgat

SEQ ID NO: 284244 - DNA, 25 bp, probe
tcacgccattgacttggcaacagaa

SEQ ID NO: 284245 - DNA, 25 bp, probe
tcacctttatgcatgggcaccaaag

SEQ ID NO: 284246 - DNA, 25 bp, probe
tcactgccttgagagtgacccaaag

SEQ ID NO: 284247 - DNA, 25 bp, probe
tcaacgtctggtatgacccagccga

SEQ ID NO: 284248 - DNA, 25 bp, probe
tcagaagtccttctacatcaatgcc

SEQ ID NO: 284249 - DNA, 25 bp, probe
tcagaaccctccttgaatcgggctg

SEQ ID NO: 284250 - DNA, 25 bp, probe
tcagaaccctccttgaatcgggctg

SEQ ID NO: 284251 - DNA, 25 bp, probe
tcagagacccacgttttcagagttg

SEQ ID NO: 284252 - DNA, 25 bp, probe
tcacaaccaaccagttcagaatgat

SEQ ID NO: 284253 - DNA, 25 bp, probe
tcacagaaaagtcttacgaatgggg

SEQ ID NO: 284254 - DNA, 25 bp, probe
taagaaggaggcggaactgacggag

SEQ ID NO: 284255 - DNA, 25 bp, probe
taagggggtggtgacggacgagcaa

SEQ ID NO: 284256 - DNA, 25 bp, probe
tcacggcggagttgtacacgggcta

SEQ ID NO: 284257 - DNA, 25 bp, probe
tcacgtatgaggagaagccgcccta

SEQ ID NO: 284258 - DNA, 25 bp, probe
tcactgtctaggagcatcacctcca

SEQ ID NO: 284259 - DNA, 25 bp, probe
tcagctggtagggaaagactctgca

SEQ ID NO: 284260 - DNA, 25 bp, probe
tcactgtgtgcaacaacaacccgct

SEQ ID NO: 284261 - DNA, 25 bp, probe
tcactgtgtgcaacaacaacccgct

SEQ ID NO: 284262 - DNA, 25 bp, probe
tcagcgtgctggagaagaccgcctt

SEQ ID NO: 284263 - DNA, 25 bp, probe
tcacagttgccatgtagaccccttg

SEQ ID NO: 284264 - DNA, 25 bp, probe
tcaccttcaatgctgaagccctctc

SEQ ID NO: 284265 - DNA, 25 bp, probe
tactcttatttggaaggccctaaag

SEQ ID NO: 284266 - DNA, 25 bp, probe
taatttgatcttgtagacccaaaaa

SEQ ID NO: 284267 - DNA, 25 bp, probe
tcacagttacttatggagcaccaaa

SEQ ID NO: 284268 - DNA, 25 bp, probe
tcactgttgactgtggagagtccca

SEQ ID NO: 284269 - DNA, 25 bp, probe
tcactggtgactgatgaagagcatc

SEQ ID NO: 284270 - DNA, 25 bp, probe
tcacgcttgtgaagaacgagatcaa

SEQ ID NO: 284271 - DNA, 25 bp, probe
tcacctggctgtggcaacggacaaa

SEQ ID NO: 284272 - DNA, 25 bp, probe
tcaccgcgatcttaaatgtgacaac

SEQ ID NO: 284273 - DNA, 25 bp, probe
tcagcaccaagcagaaggtggccct

SEQ ID NO: 284274 - DNA, 25 bp, probe
taccaaagacagtggtggtccggtg

SEQ ID NO: 284275 - DNA, 25 bp, probe
tactcaaagaggtgacgtccgtggg

SEQ ID NO: 284276 - DNA, 25 bp, probe
tcactaaggggccgaccccatggag

SEQ ID NO: 284277 - DNA, 25 bp, probe
tcactgcaaggggatgctgcacccc

SEQ ID NO: 284278 - DNA, 25 bp, probe
tcagagccaggaaatgcatcctccc

SEQ ID NO: 284279 - DNA, 25 bp, probe
tcagcagttggaaagctctctattc

SEQ ID NO: 284280 - DNA, 25 bp, probe
tcagatggtgtgtccagcactcgat

SEQ ID NO: 284281 - DNA, 25 bp, probe
tcagatggagtgccggtctgcagag

SEQ ID NO: 284282 - DNA, 25 bp, probe
tcagcagtatggccagattctccag

SEQ ID NO: 284283 - DNA, 25 bp, probe
tcagatgacagccggttctctgcac

SEQ ID NO: 284284 - DNA, 25 bp, probe
tcagaagctccgcttcacatgcaga

SEQ ID NO: 284285 - DNA, 25 bp, probe
tcagaattccagccgctcatctgaa

SEQ ID NO: 284286 - DNA, 25 bp, probe
tcagaagtgccatgaccttgcatag

SEQ ID NO: 284287 - DNA, 25 bp, probe
tcagaagagctgaaaactttggaag

SEQ ID NO: 284288 - DNA, 25 bp, probe
tcagcaacactggtcacgtttggaa

SEQ ID NO: 284289 - DNA, 25 bp, probe
tacaaagtggtgccgatatgtgaga

SEQ ID NO: 284290 - DNA, 25 bp, probe
tcaccaactgggacgacatggagaa

SEQ ID NO: 284291 - DNA, 25 bp, probe
tcacctcgcgggactcacgaggcaa

SEQ ID NO: 284292 - DNA, 25 bp, probe
tcacctcgcgggactcacgaggcaa

SEQ ID NO: 284293 - DNA, 25 bp, probe
tcacctccagggagatccagacggc

SEQ ID NO: 284294 - DNA, 25 bp, probe
tcaacagacgggagtccagccaggg

SEQ ID NO: 284295 - DNA, 25 bp, probe
tcaacagacgggagtccagccaggg

SEQ ID NO: 284296 - DNA, 25 bp, probe
tcaccagaagggggcttaccaagaa

SEQ ID NO: 284297 - DNA, 25 bp, probe
tcactggaagccgggtttccggaag

SEQ ID NO: 284298 - DNA, 25 bp, probe
tcactggaaccggccggtgctagtg

SEQ ID NO: 284299 - DNA, 25 bp, probe
tcactggaaccggccggtgctagtg

SEQ ID NO: 284300 - DNA, 25 bp, probe
tcactgggacccccaggaggtgacc

SEQ ID NO: 284301 - DNA, 25 bp, probe
taaaggacaccgggcaagccgactc

SEQ ID NO: 284302 - DNA, 25 bp, probe
taaactgcccatctggagaatcgcc

SEQ ID NO: 284303 - DNA, 25 bp, probe
tcaccatcttccaggagcgagatcc

SEQ ID NO: 284304 - DNA, 25 bp, probe
tcacctctacctagtgctggaacgg

SEQ ID NO: 284305 - DNA, 25 bp, probe
tcacctctacctagtgctggaacgg

SEQ ID NO: 284306 - DNA, 25 bp, probe
tcagcccttcctagaagagtcagga

SEQ ID NO: 284307 - DNA, 25 bp, probe
tcaccttctccaagcaaagccatat

SEQ ID NO: 284308 - DNA, 25 bp, probe
tcaccttctccaagcaaagccatat

SEQ ID NO: 284309 - DNA, 25 bp, probe
tcagccacttctaagcacaaccaga

SEQ ID NO: 284310 - DNA, 25 bp, probe
tcagccagtttctgccagacactga

SEQ ID NO: 284311 - DNA, 25 bp, probe
tcagcgagattcctgagccgttcta

SEQ ID NO: 284312 - DNA, 25 bp, probe
tcagcgagattcctgagccgttcta

SEQ ID NO: 284313 - DNA, 25 bp, probe
tcactgatggtcactccgattctga

SEQ ID NO: 284314 - DNA, 25 bp, probe
tcactgatggtcactccgattctga

SEQ ID NO: 284315 - DNA, 25 bp, probe
tcactggagcctgctgggaacgtga

SEQ ID NO: 284316 - DNA, 25 bp, probe
tcactggtgttttggataacttggt

SEQ ID NO: 284317 - DNA, 25 bp, probe
tcactgggttttggtatggtttgtt

SEQ ID NO: 284318 - DNA, 25 bp, probe
tcacgtgtattctattttgcgtttc

SEQ ID NO: 284319 - DNA, 25 bp, probe
tcagcctgttaggtttaggatatat

SEQ ID NO: 284320 - DNA, 25 bp, probe
tacaccttcaggcttaggtccattc

SEQ ID NO: 284321 - DNA, 25 bp, probe
taaggttcaggccgtaggttcctca

SEQ ID NO: 284322 - DNA, 25 bp, probe
tacgaaccggccaagaggttctcca

SEQ ID NO: 284323 - DNA, 25 bp, probe
tcaaaacatccccaaaggtttctat

SEQ ID NO: 284324 - DNA, 25 bp, probe
tcaaaatcacccaaaacttttggca

SEQ ID NO: 284325 - DNA, 25 bp, probe
tcaaaggcctcagaaaccattgtgt

SEQ ID NO: 284326 - DNA, 25 bp, probe
tcagacggggcagacagccctcatg

SEQ ID NO: 284327 - DNA, 25 bp, probe
tcagcacggggatcacagacttaga

SEQ ID NO: 284328 - DNA, 25 bp, probe
tcagcggaggagaacactggcttgg

SEQ ID NO: 284329 - DNA, 25 bp, probe
tcagcagtgggatacctgcgcttga

SEQ ID NO: 284330 - DNA, 25 bp, probe
tcagcagtgggatacctgcgcttga

SEQ ID NO: 284331 - DNA, 25 bp, probe
tcagcctgtgtttacctgagttggc

SEQ ID NO: 284332 - DNA, 25 bp, probe
tcacctgtgtatttcagtgtggagg

SEQ ID NO: 284333 - DNA, 25 bp, probe
tcacctgtttcctgtatggaggagg

SEQ ID NO: 284334 - DNA, 25 bp, probe
tcaccttaccactgacaggtcgtgg

SEQ ID NO: 284335 - DNA, 25 bp, probe
tcacctaacactgacacggtctgga

SEQ ID NO: 284336 - DNA, 25 bp, probe
tcactctaaagggaactgtgacatt

SEQ ID NO: 284337 - DNA, 25 bp, probe
tagccataaaggggagggactcatc

SEQ ID NO: 284338 - DNA, 25 bp, probe
tagcgcataataaggggaagacttt

SEQ ID NO: 284339 - DNA, 25 bp, probe
tactggagaccgtggacagaccaat

SEQ ID NO: 284340 - DNA, 25 bp, probe
tactggagaccgtggacagaccaat

SEQ ID NO: 284341 - DNA, 25 bp, probe
tcagcatgctgaaccgacggacgac

SEQ ID NO: 284342 - DNA, 25 bp, probe
tcagcagctgacgctggcaagtcca

SEQ ID NO: 284343 - DNA, 25 bp, probe
tcagcagctgacgctggcaagtcca

SEQ ID NO: 284344 - DNA, 25 bp, probe
tcacagcatcagggggctcagagtc

SEQ ID NO: 284345 - DNA, 25 bp, probe
tcacagcatcagggggctcagagtc

SEQ ID NO: 284346 - DNA, 25 bp, probe
tcagcaatgcaggagggcactggag

SEQ ID NO: 284347 - DNA, 25 bp, probe
tcagcaacagacttcgactggctct

SEQ ID NO: 284348 - DNA, 25 bp, probe
tcagcagtcagcctgctcagagcgg

SEQ ID NO: 284349 - DNA, 25 bp, probe
tcagcatgctcaccagcgaatgcac

SEQ ID NO: 284350 - DNA, 25 bp, probe
tcagcatcatctggcaggaagcact

SEQ ID NO: 284351 - DNA, 25 bp, probe
tcagcattatctcggacacatcttg

SEQ ID NO: 284352 - DNA, 25 bp, probe
tcagcatctacctgaacatccagag

SEQ ID NO: 284353 - DNA, 25 bp, probe
tcagaagcacctgaactccacggaa

SEQ ID NO: 284354 - DNA, 25 bp, probe
tcagaagcacctgaactccacggaa

SEQ ID NO: 284355 - DNA, 25 bp, probe
tcagaagcacctgaactccacggaa

SEQ ID NO: 284356 - DNA, 25 bp, probe
tcaaagcacctagacctggaccaga

SEQ ID NO: 284357 - DNA, 25 bp, probe
tcactaacctgacagttgttgccag

SEQ ID NO: 284358 - DNA, 25 bp, probe
tcactttcgaagcagccgtggctac

SEQ ID NO: 284359 - DNA, 25 bp, probe
tcactttcgaagcagccgtggctac

SEQ ID NO: 284360 - DNA, 25 bp, probe
tcactaccaaatgagccttagctac

SEQ ID NO: 284361 - DNA, 25 bp, probe
tcaccaccataaaacccttgagcac

SEQ ID NO: 284362 - DNA, 25 bp, probe
tcaccccaaacaactcagcttcggg

SEQ ID NO: 284363 - DNA, 25 bp, probe
tcactcccaaatggaccctgtgggg

SEQ ID NO: 284364 - DNA, 25 bp, probe
tcacccatcaaaagcaccagcaggc

SEQ ID NO: 284365 - DNA, 25 bp, probe
tcacccatggaaagcattagtctga

SEQ ID NO: 284366 - DNA, 25 bp, probe
tcaccctgtggcacttgggctattg

SEQ ID NO: 284367 - DNA, 25 bp, probe
tcactcgctgggggtgtttgtttgc

SEQ ID NO: 284368 - DNA, 25 bp, probe
tcaccttggggcttgacttttgtat

SEQ ID NO: 284369 - DNA, 25 bp, probe
taaatatggtcgttactattttcag

SEQ ID NO: 284370 - DNA, 25 bp, probe
tcaatatttggccagtaccttttcc

SEQ ID NO: 284371 - DNA, 25 bp, probe
tcagaatattggttcttcttttatc

SEQ ID NO: 284372 - DNA, 25 bp, probe
tcagcactgttgcactttatgtttt

SEQ ID NO: 284373 - DNA, 25 bp, probe
tcagcaagtgtttatgtattttgta

SEQ ID NO: 284374 - DNA, 25 bp, probe
tcagaaccctgaatgcaacttctgt

SEQ ID NO: 284375 - DNA, 25 bp, probe
tcaccaaccagttatactccttgag

SEQ ID NO: 284376 - DNA, 25 bp, probe
tcaccacagccgggtttacttcatg

SEQ ID NO: 284377 - DNA, 25 bp, probe
tcacccacccatatggaaattgctg

SEQ ID NO: 284378 - DNA, 25 bp, probe
tcacgccttccaactcaaaattagc

SEQ ID NO: 284379 - DNA, 25 bp, probe
tcacagcccctaactcataaagcaa

SEQ ID NO: 284380 - DNA, 25 bp, probe
tcacagcccctaactcataaagcaa

SEQ ID NO: 284381 - DNA, 25 bp, probe
tcagctcccaatgtgcatataaaca

SEQ ID NO: 284382 - DNA, 25 bp, probe
tcagccccatagtgctcaggaggca

SEQ ID NO: 284383 - DNA, 25 bp, probe
tcagacgccatctttgacctaggca

SEQ ID NO: 284384 - DNA, 25 bp, probe
tcagactggatttgtgagtgctggg

SEQ ID NO: 284385 - DNA, 25 bp, probe
tcagacatggttagcagagctgctg

SEQ ID NO: 284386 - DNA, 25 bp, probe
tcagcgcagcttgtgagactgatgt

SEQ ID NO: 284387 - DNA, 25 bp, probe
tcagcgcagcttgtgagactgatgt

SEQ ID NO: 284388 - DNA, 25 bp, probe
tcagcatcagcatgttggacacact

SEQ ID NO: 284389 - DNA, 25 bp, probe
tcagcatcagcatgttggacacact

SEQ ID NO: 284390 - DNA, 25 bp, probe
tcagcatcgcggatgaagacgcacg

SEQ ID NO: 284391 - DNA, 25 bp, probe
tcagcatcgcggatgaagacgcacg

SEQ ID NO: 284392 - DNA, 25 bp, probe
tcagcattcaggtgatcagcaggac

SEQ ID NO: 284393 - DNA, 25 bp, probe
tcagcattcagtttgtcaatgaagt

SEQ ID NO: 284394 - DNA, 25 bp, probe
tcagcttgcagtttgtaattgacta

SEQ ID NO: 284395 - DNA, 25 bp, probe
tcagcactcttacttatttctctgt

SEQ ID NO: 284396 - DNA, 25 bp, probe
tcagaacttactcatcagtcacctg

SEQ ID NO: 284397 - DNA, 25 bp, probe
tcagaacttactcatcagtcacctg

SEQ ID NO: 284398 - DNA, 25 bp, probe
tcagaatctgatgctttctgatcaa

SEQ ID NO: 284399 - DNA, 25 bp, probe
tcagcaatgagctcatctcctacaa

SEQ ID NO: 284400 - DNA, 25 bp, probe
tcagcaatggcagattatcgacatc

SEQ ID NO: 284401 - DNA, 25 bp, probe
tcagaagcacctattctgactccac

SEQ ID NO: 284402 - DNA, 25 bp, probe
tcagaagcaccgtgtctgaaccgtt

SEQ ID NO: 284403 - DNA, 25 bp, probe
tcaacgccgactttcagaaggtgtt

SEQ ID NO: 284404 - DNA, 25 bp, probe
tcacaccgcgcagtatggagagcat

SEQ ID NO: 284405 - DNA, 25 bp, probe
tcaccacgctgagatgctgatgtca

SEQ ID NO: 284406 - DNA, 25 bp, probe
tcactgacctgtgcatctgcatcaa

SEQ ID NO: 284407 - DNA, 25 bp, probe
tcagctgctgagggccctgaaagct

SEQ ID NO: 284408 - DNA, 25 bp, probe
tcagctgcatggagcctggaactgc

SEQ ID NO: 284409 - DNA, 25 bp, probe
tcagctgcatggagcctggaactgc

SEQ ID NO: 284410 - DNA, 25 bp, probe
tcagccatgattagacgttgactgc

SEQ ID NO: 284411 - DNA, 25 bp, probe
tcagcgagactcagcttgtagctga

SEQ ID NO: 284412 - DNA, 25 bp, probe
tcagccggctgcatctttgcagagc

SEQ ID NO: 284413 - DNA, 25 bp, probe
tcagccggctgcatctttgcagagc

SEQ ID NO: 284414 - DNA, 25 bp, probe
tcacctggctcaatggttgcatcaa

SEQ ID NO: 284415 - DNA, 25 bp, probe
tcagctctgttcatgagtgctcaga

SEQ ID NO: 284416 - DNA, 25 bp, probe
tcagctgctgttctaacctcagtaa

SEQ ID NO: 284417 - DNA, 25 bp, probe
tcagctgaggctctgagaactggta

SEQ ID NO: 284418 - DNA, 25 bp, probe
tcagcagggcctctaacctgtgatg

SEQ ID NO: 284419 - DNA, 25 bp, probe
tcagcagggcctctaacctgtgatg

SEQ ID NO: 284420 - DNA, 25 bp, probe
tcacatgggacccaacatccttcat

SEQ ID NO: 284421 - DNA, 25 bp, probe
tcagcatccgacgggaacatctcca

SEQ ID NO: 284422 - DNA, 25 bp, probe
tcagcacgtggtggctcaaatctcc

SEQ ID NO: 284423 - DNA, 25 bp, probe
tcagcacgtggtggctcaaatctcc

SEQ ID NO: 284424 - DNA, 25 bp, probe
tcagcagcgggtttggaacatagcg

SEQ ID NO: 284425 - DNA, 25 bp, probe
tcaagaagtgcctgaggactcacgc

SEQ ID NO: 284426 - DNA, 25 bp, probe
tcacagatgaaacaaggatcttccg

SEQ ID NO: 284427 - DNA, 25 bp, probe
tcagcagaggtaccacgaagctacc

SEQ ID NO: 284428 - DNA, 25 bp, probe
tcagcagaggtaccacgaagctacc

SEQ ID NO: 284429 - DNA, 25 bp, probe
tcagcaacgctaccacgaagacatt

SEQ ID NO: 284430 - DNA, 25 bp, probe
tcagcaatcagcagacacgggagtt

SEQ ID NO: 284431 - DNA, 25 bp, probe
tcagcgtcgacaccggggagctgat

SEQ ID NO: 284432 - DNA, 25 bp, probe
tcagcctgctcagagcgggggtgct

SEQ ID NO: 284433 - DNA, 25 bp, probe
taacttcccagggggcaggcactta

SEQ ID NO: 284434 - DNA, 25 bp, probe
taaacgccttggtggaggaccagat

SEQ ID NO: 284435 - DNA, 25 bp, probe
tcaaagggcaatcgggaaggagcac

SEQ ID NO: 284436 - DNA, 25 bp, probe
tcagaaggtgtttggtatgggaacc

SEQ ID NO: 284437 - DNA, 25 bp, probe
taaaggattctgtgtccgaggccac

SEQ ID NO: 284438 - DNA, 25 bp, probe
tcagcaaaatgggagggacgggctc

SEQ ID NO: 284439 - DNA, 25 bp, probe
tcaccactcagggaggacctgggcc

SEQ ID NO: 284440 - DNA, 25 bp, probe
tcacgccacgggaaggccatgagcc

SEQ ID NO: 284441 - DNA, 25 bp, probe
tcacgccacgggaaggccatgagcc

SEQ ID NO: 284442 - DNA, 25 bp, probe
tcaccacacggaagtggaagactcc

SEQ ID NO: 284443 - DNA, 25 bp, probe
tacaaacctgtcctggaattctacc

SEQ ID NO: 284444 - DNA, 25 bp, probe
taaaagttgggggtgttctgcccag

SEQ ID NO: 284445 - DNA, 25 bp, probe
tagtaatgggggtgtttctggcttg

SEQ ID NO: 284446 - DNA, 25 bp, probe
tagtaatgggggtgtttctggcttg

SEQ ID NO: 284447 - DNA, 25 bp, probe
tagtacggggcctttggtgtggctt

SEQ ID NO: 284448 - DNA, 25 bp, probe
tatgtaaggggtttcctgcagaatt

SEQ ID NO: 284449 - DNA, 25 bp, probe
tcacctgggggttccccagagacta

SEQ ID NO: 284450 - DNA, 25 bp, probe
tcagccatagagagatccttccaga

SEQ ID NO: 284451 - DNA, 25 bp, probe
tcactgctacagagccacagtacca

SEQ ID NO: 284452 - DNA, 25 bp, probe
tcactgctacagagccacagtacca

SEQ ID NO: 284453 - DNA, 25 bp, probe
tcactgcacggcaccaagtacacat

SEQ ID NO: 284454 - DNA, 25 bp, probe
tcactcacggagccaaagtcaacgc

SEQ ID NO: 284455 - DNA, 25 bp, probe
tcaccagtgtgaaccaagccagcac

SEQ ID NO: 284456 - DNA, 25 bp, probe
tcacacgcgattgcgcaatgccata

SEQ ID NO: 284457 - DNA, 25 bp, probe
tcacacctgttctgaatccagcatg

SEQ ID NO: 284458 - DNA, 25 bp, probe
tcagcacctttctgccagagcagag

SEQ ID NO: 284459 - DNA, 25 bp, probe
tcagcagccattgccacgaagatgg

SEQ ID NO: 284460 - DNA, 25 bp, probe
tcacagcacatctgcccagattctg

SEQ ID NO: 284461 - DNA, 25 bp, probe
tcacatgctaaagccaggattgtgt

SEQ ID NO: 284462 - DNA, 25 bp, probe
tcagcactgaaaccgagtcacctgt

SEQ ID NO: 284463 - DNA, 25 bp, probe
tcagctctggtacctatggtcgtgt

SEQ ID NO: 284464 - DNA, 25 bp, probe
tcagctctggtacctatggtcgtgt

SEQ ID NO: 284465 - DNA, 25 bp, probe
tcagctctcttcatccagtaagttc

SEQ ID NO: 284466 - DNA, 25 bp, probe
tcagctctcttcatccagtaagttc

SEQ ID NO: 284467 - DNA, 25 bp, probe
tcagctcacttcaataactattttc

SEQ ID NO: 284468 - DNA, 25 bp, probe
tcactcctgtaaggactttttcttt

SEQ ID NO: 284469 - DNA, 25 bp, probe
tcagctgccatattacgacttagtg

SEQ ID NO: 284470 - DNA, 25 bp, probe
tcactgcctactgtgacttcatgcc

SEQ ID NO: 284471 - DNA, 25 bp, probe
tcagcttgtactgctacgatccgac

SEQ ID NO: 284472 - DNA, 25 bp, probe
tcagctcattacactaagatgtgga

SEQ ID NO: 284473 - DNA, 25 bp, probe
tcactgttactgtcctaagtcgaaa

SEQ ID NO: 284474 - DNA, 25 bp, probe
tcactgtctacaacaccaacatcga

SEQ ID NO: 284475 - DNA, 25 bp, probe
tcactggagacctactgcaaacaga

SEQ ID NO: 284476 - DNA, 25 bp, probe
tcacagagccatcctaacaaacgga

SEQ ID NO: 284477 - DNA, 25 bp, probe
tcacaacctgacacagccaattata

SEQ ID NO: 284478 - DNA, 25 bp, probe
tcaaaatctgcccaaccaattgaga

SEQ ID NO: 284479 - DNA, 25 bp, probe
tcagcaaaccggggcctactagagt

SEQ ID NO: 284480 - DNA, 25 bp, probe
tagataacctcgggccgatcgcacg

SEQ ID NO: 284481 - DNA, 25 bp, probe
taataactcggattccagcccacat

SEQ ID NO: 284482 - DNA, 25 bp, probe
taatggaccaggatcggcttcctgc

SEQ ID NO: 284483 - DNA, 25 bp, probe
tcacggactcgaagtgaccttcctg

SEQ ID NO: 284484 - DNA, 25 bp, probe
tcagcgtagtgttttgacctttcta

SEQ ID NO: 284485 - DNA, 25 bp, probe
tcacgtaggtttgctgccttcagaa

SEQ ID NO: 284486 - DNA, 25 bp, probe
tcacgggagatttcttgttgctcaa

SEQ ID NO: 284487 - DNA, 25 bp, probe
tcacggtttctttctttgctaaatt

SEQ ID NO: 284488 - DNA, 25 bp, probe
tcacggtttctttctttgctaaatt

SEQ ID NO: 284489 - DNA, 25 bp, probe
tcacctacttccacattttcaaaat

SEQ ID NO: 284490 - DNA, 25 bp, probe
tacgctacatgacaacgtttcgaca

SEQ ID NO: 284491 - DNA, 25 bp, probe
tcactgtcctaaaacgttaccagca

SEQ ID NO: 284492 - DNA, 25 bp, probe
tcactggactacaagacggtacccc

SEQ ID NO: 284493 - DNA, 25 bp, probe
tcaagtcctcgcaggggtaccgagc

SEQ ID NO: 284494 - DNA, 25 bp, probe
tcacaggactcgagggggacagaca

SEQ ID NO: 284495 - DNA, 25 bp, probe
tcacagtactggtttccaggaggaa

SEQ ID NO: 284496 - DNA, 25 bp, probe
tatgagtacgactgggccgggaagc

SEQ ID NO: 284497 - DNA, 25 bp, probe
tcagccgactactggtcactgggaa

SEQ ID NO: 284498 - DNA, 25 bp, probe
tcagcctacaagggccacctggaga

SEQ ID NO: 284499 - DNA, 25 bp, probe
tcagccaataggagccagccaggaa

SEQ ID NO: 284500 - DNA, 25 bp, probe
tcagcgactttggtctcaccaagga

SEQ ID NO: 284501 - DNA, 25 bp, probe
tcactgactttggcctctgcaaaga

SEQ ID NO: 284502 - DNA, 25 bp, probe
tcactaattcttatctcatatggag

SEQ ID NO: 284503 - DNA, 25 bp, probe
tcacgtatgtttgtccgcacatgca

SEQ ID NO: 284504 - DNA, 25 bp, probe
tcacgaactgttcacactgcagaga

SEQ ID NO: 284505 - DNA, 25 bp, probe
tcaccaagcttgaccgcattggcaa

SEQ ID NO: 284506 - DNA, 25 bp, probe
tcagctcaatgcactaatgcctggc

SEQ ID NO: 284507 - DNA, 25 bp, probe
tcacataattattcagtcactgcct

SEQ ID NO: 284508 - DNA, 25 bp, probe
tcagctgaatcgtgtgtcctgtcat

SEQ ID NO: 284509 - DNA, 25 bp, probe
tcagctggacgctatgttcgtgaga

SEQ ID NO: 284510 - DNA, 25 bp, probe
tcactgtgacagttctccaggaagg

SEQ ID NO: 284511 - DNA, 25 bp, probe
tcacgtgagtggctccaccatagcc

SEQ ID NO: 284512 - DNA, 25 bp, probe
tcactgggtgtgaacccttaccctg

SEQ ID NO: 284513 - DNA, 25 bp, probe
tcactggcatgggagacccttgaca

SEQ ID NO: 284514 - DNA, 25 bp, probe
tcagcttcatggggacctttgagct

SEQ ID NO: 284515 - DNA, 25 bp, probe
tcagctggatgcagtgaaccttgag

SEQ ID NO: 284516 - DNA, 25 bp, probe
tcagctggatgcactacaaccagac

SEQ ID NO: 284517 - DNA, 25 bp, probe
tcagctggttattgctaacatagac

SEQ ID NO: 284518 - DNA, 25 bp, probe
tcacccctatcagtatactagcacc

SEQ ID NO: 284519 - DNA, 25 bp, probe
tcaccagcctgaaaatcctcaacac

SEQ ID NO: 284520 - DNA, 25 bp, probe
tcaccaattcatcacaactaactcc

SEQ ID NO: 284521 - DNA, 25 bp, probe
tcaccaactgtcagaaggcaaccac

SEQ ID NO: 284522 - DNA, 25 bp, probe
tcaccaacctgcagcatgagcacat

SEQ ID NO: 284523 - DNA, 25 bp, probe
tcagcatcatcagcaaagtcgactt

SEQ ID NO: 284524 - DNA, 25 bp, probe
tcagctctcacatgaatatcgacat

SEQ ID NO: 284525 - DNA, 25 bp, probe
tcagcttgcaaggagataggagctc

SEQ ID NO: 284526 - DNA, 25 bp, probe
tcagcccagcacggagaggacatcc

SEQ ID NO: 284527 - DNA, 25 bp, probe
tcactgccatgatagctggggcttc

SEQ ID NO: 284528 - DNA, 25 bp, probe
tcactccatacttcggtagcagtcg

SEQ ID NO: 284529 - DNA, 25 bp, probe
tcactcagcaacactggtcacgttt

SEQ ID NO: 284530 - DNA, 25 bp, probe
tcaccacagacaagatggcccagga

SEQ ID NO: 284531 - DNA, 25 bp, probe
tcaccaagagcgacttgcgcctgga

SEQ ID NO: 284532 - DNA, 25 bp, probe
tcagcagaagaggccctgcagcacc

SEQ ID NO: 284533 - DNA, 25 bp, probe
tcagcagaagaggccctgcagcacc

SEQ ID NO: 284534 - DNA, 25 bp, probe
tcagcagaaacccgtcatgacgcgg

SEQ ID NO: 284535 - DNA, 25 bp, probe
tcaacatcaagcagttcatggcgag

SEQ ID NO: 284536 - DNA, 25 bp, probe
tcaccgagcgcttgatgtgcgcgga

SEQ ID NO: 284537 - DNA, 25 bp, probe
tcacccagtctggagtgcagtggca

SEQ ID NO: 284538 - DNA, 25 bp, probe
tcacccagcaggagtcgtggcagaa

SEQ ID NO: 284539 - DNA, 25 bp, probe
tcaccaaaggagcctctgtatggaa

SEQ ID NO: 284540 - DNA, 25 bp, probe
tcaacaaacggggctcaaggaacca

SEQ ID NO: 284541 - DNA, 25 bp, probe
tcaagtaagcggcaacaagggtccg

SEQ ID NO: 284542 - DNA, 25 bp, probe
tcacaggctcagggcaaagaagtgg

SEQ ID NO: 284543 - DNA, 25 bp, probe
tcagcaggcacggtcaaaagggcaa

SEQ ID NO: 284544 - DNA, 25 bp, probe
tcacggcttactgcaagagaggcaa

SEQ ID NO: 284545 - DNA, 25 bp, probe
tcagcaggttccccaaaaggctgcc

SEQ ID NO: 284546 - DNA, 25 bp, probe
tcagcaggttccccaaaaggctgcc

SEQ ID NO: 284547 - DNA, 25 bp, probe
tcacggtctcgggagacgggctgct

SEQ ID NO: 284548 - DNA, 25 bp, probe
tcacggtctcgggagacgggctgct

SEQ ID NO: 284549 - DNA, 25 bp, probe
tcagcgttctagcaacacgtgtgtg

SEQ ID NO: 284550 - DNA, 25 bp, probe
tcagcctcttcgccaaagagtggat

SEQ ID NO: 284551 - DNA, 25 bp, probe
tcagcctcgacagtcgccaagtgga

SEQ ID NO: 284552 - DNA, 25 bp, probe
tcacccaagccagcacagagtagca

SEQ ID NO: 284553 - DNA, 25 bp, probe
tcaccacatgagtggctggagctac

SEQ ID NO: 284554 - DNA, 25 bp, probe
tcacgagcatgagtatgtgcatgga

SEQ ID NO: 284555 - DNA, 25 bp, probe
tcagcgacacacatgtgcaagctgt

SEQ ID NO: 284556 - DNA, 25 bp, probe
tcagcggctccagctcatatgctga

SEQ ID NO: 284557 - DNA, 25 bp, probe
tcagcttccacagcatcaagcagac

SEQ ID NO: 284558 - DNA, 25 bp, probe
tcactatccgatgcaccaaactaat

SEQ ID NO: 284559 - DNA, 25 bp, probe
tcactacccccaggagatattcact

SEQ ID NO: 284560 - DNA, 25 bp, probe
tcactcaccccatagacaaggcaat

SEQ ID NO: 284561 - DNA, 25 bp, probe
tcactacagcatcaatagaaagtca

SEQ ID NO: 284562 - DNA, 25 bp, probe
tcaccacagatggaattaacttcat

SEQ ID NO: 284563 - DNA, 25 bp, probe
tcacccgaagatttaagatacacca

SEQ ID NO: 284564 - DNA, 25 bp, probe
tcacctcgaagatttattggcagcc

SEQ ID NO: 284565 - DNA, 25 bp, probe
tcacacaggaggtattcttggaatg

SEQ ID NO: 284566 - DNA, 25 bp, probe
tcagccaggaaggattttgatattc

SEQ ID NO: 284567 - DNA, 25 bp, probe
tcagcccgagggacactgggttctc

SEQ ID NO: 284568 - DNA, 25 bp, probe
tatgtgactgcctttacggtttctc

SEQ ID NO: 284569 - DNA, 25 bp, probe
taatattcgttttctgggttctggc

SEQ ID NO: 284570 - DNA, 25 bp, probe
taatatgttggcttcctttttttgt

SEQ ID NO: 284571 - DNA, 25 bp, probe
taatatgttggcttcctttttttgt

SEQ ID NO: 284572 - DNA, 25 bp, probe
taaatggtcccctgtgtttgtagag

SEQ ID NO: 284573 - DNA, 25 bp, probe
taacaggtaaccacaattttcaggt

SEQ ID NO: 284574 - DNA, 25 bp, probe
taacaggtaaccacaattttcaggt

SEQ ID NO: 284575 - DNA, 25 bp, probe
tagagacgtgaagccagaaaatatc

SEQ ID NO: 284576 - DNA, 25 bp, probe
tagaactggcaacctcagccaagcc

SEQ ID NO: 284577 - DNA, 25 bp, probe
tcaagatcttgaaaacatcgtagcg

SEQ ID NO: 284578 - DNA, 25 bp, probe
tcaactgctcagtagatacgtgtgg

SEQ ID NO: 284579 - DNA, 25 bp, probe
tcactctgtgagtgcacattttggt

SEQ ID NO: 284580 - DNA, 25 bp, probe
tcaccatgattgtctgctattcagt

SEQ ID NO: 284581 - DNA, 25 bp, probe
tcactctgctctgctgtgtttgtga

SEQ ID NO: 284582 - DNA, 25 bp, probe
tcagctatgctctgtgtctgtggga

SEQ ID NO: 284583 - DNA, 25 bp, probe
tcagcctcccgagtagctgggactg

SEQ ID NO: 284584 - DNA, 25 bp, probe
tcagcctcccgagtagctgggacta

SEQ ID NO: 284585 - DNA, 25 bp, probe
tcagcctcccaagcagctgggacta

SEQ ID NO: 284586 - DNA, 25 bp, probe
tcagcctcccatcagaatggaacga

SEQ ID NO: 284587 - DNA, 25 bp, probe
tcaccacacgcacttatcaggaacg

SEQ ID NO: 284588 - DNA, 25 bp, probe
tcaccatgaccattgtactgacaac

SEQ ID NO: 284589 - DNA, 25 bp, probe
tcaccagaccattccgcttcaaggc

SEQ ID NO: 284590 - DNA, 25 bp, probe
tcaccaagtacaccagcgctaagta

SEQ ID NO: 284591 - DNA, 25 bp, probe
tcactctagtccaggtgccaagaat

SEQ ID NO: 284592 - DNA, 25 bp, probe
tcacctttccattgttgcatcttga

SEQ ID NO: 284593 - DNA, 25 bp, probe
tactttggccatgttagcctggtca

SEQ ID NO: 284594 - DNA, 25 bp, probe
tcagctgtttaagtttaccggtatt

SEQ ID NO: 284595 - DNA, 25 bp, probe
taattttctttatagccgagtttct

SEQ ID NO: 284596 - DNA, 25 bp, probe
taatttagcttctaggatccaagtt

SEQ ID NO: 284597 - DNA, 25 bp, probe
taatattatttatggacctctggcc

SEQ ID NO: 284598 - DNA, 25 bp, probe
taatattatttatggacctctggcc

SEQ ID NO: 284599 - DNA, 25 bp, probe
taatgtttcggagtccaggactggc

SEQ ID NO: 284600 - DNA, 25 bp, probe
taatggtaccagcctgtcacaactg

SEQ ID NO: 284601 - DNA, 25 bp, probe
tcacagcagtgacagcctatcagaa

SEQ ID NO: 284602 - DNA, 25 bp, probe
tcaccatgatggccaggctgatctc

SEQ ID NO: 284603 - DNA, 25 bp, probe
tcagccagatcacgcagcctggcac

SEQ ID NO: 284604 - DNA, 25 bp, probe
tcagccagatcacgcagcctggcac

SEQ ID NO: 284605 - DNA, 25 bp, probe
tcaccaatgcagccagctgtgcctg

SEQ ID NO: 284606 - DNA, 25 bp, probe
tcagcccagcagaagcattatcttt

SEQ ID NO: 284607 - DNA, 25 bp, probe
accacaataaggcatgatctggatt

SEQ ID NO: 284608 - DNA, 25 bp, probe
tcagctccaattttcatccatgttt

SEQ ID NO: 284609 - DNA, 25 bp, probe
tcagcctcaagctttacacagctgt

SEQ ID NO: 284610 - DNA, 25 bp, probe
tcagctgccattctccaaagctgct

SEQ ID NO: 284611 - DNA, 25 bp, probe
tcagctgccagcaaagccaaggtgc

SEQ ID NO: 284612 - DNA, 25 bp, probe
tcacatccagtgtcagtcagaggac

SEQ ID NO: 284613 - DNA, 25 bp, probe
tattcctcgtgctaaaggacaaacc

SEQ ID NO: 284614 - DNA, 25 bp, probe
ttatccttggtttaggaaagccata

SEQ ID NO: 284615 - DNA, 25 bp, probe
tcacgttttgttttgtgccaaccta

SEQ ID NO: 284616 - DNA, 25 bp, probe
tcacgttttgttttgtgccaaccta

SEQ ID NO: 284617 - DNA, 25 bp, probe
tcacagttcttggtgactgtcccac

SEQ ID NO: 284618 - DNA, 25 bp, probe
tcacgttcttgtaacacagctccac

SEQ ID NO: 284619 - DNA, 25 bp, probe
tcacgttcttgtaacacagctccac

SEQ ID NO: 284620 - DNA, 25 bp, probe
tcacgggttgaattcacattccctg

SEQ ID NO: 284621 - DNA, 25 bp, probe
tcacgaggcaacaacatccttcacg

SEQ ID NO: 284622 - DNA, 25 bp, probe
tcacgaggcaacaacatccttcacg

SEQ ID NO: 284623 - DNA, 25 bp, probe
tcactagctgaagttaccttttttg

SEQ ID NO: 284624 - DNA, 25 bp, probe
tcaccaggaagtggaccactttttc

SEQ ID NO: 284625 - DNA, 25 bp, probe
tcaccggatccttgacaactttatc

SEQ ID NO: 284626 - DNA, 25 bp, probe
tcaccggatccttgacaactttatc

SEQ ID NO: 284627 - DNA, 25 bp, probe
tcaccaggagaatgtgcaactttat

SEQ ID NO: 284628 - DNA, 25 bp, probe
tcaccagcaaaatctaagtccttcc

SEQ ID NO: 284629 - DNA, 25 bp, probe
tacaggaagcaaactaagcccccgc

SEQ ID NO: 284630 - DNA, 25 bp, probe
tcacaggaagcaaacccagctccta

SEQ ID NO: 284631 - DNA, 25 bp, probe
tcacagggatgtgaagccccactgt

SEQ ID NO: 284632 - DNA, 25 bp, probe
tcacagggttcacatggtccagact

SEQ ID NO: 284633 - DNA, 25 bp, probe
tacgtggaacaccaggccaaagctg

SEQ ID NO: 284634 - DNA, 25 bp, probe
tcacgcggaacagttggccaacatg

SEQ ID NO: 284635 - DNA, 25 bp, probe
tcacctgaaacagcttccagagtgt

SEQ ID NO: 284636 - DNA, 25 bp, probe
tcacctaagtcatctttgaggtgta

SEQ ID NO: 284637 - DNA, 25 bp, probe
tcacccatacatcactgtttggtat

SEQ ID NO: 284638 - DNA, 25 bp, probe
tcaccaatactagagtcatagcgtt

SEQ ID NO: 284639 - DNA, 25 bp, probe
tcaccaacaccagggtaagatgggt

SEQ ID NO: 284640 - DNA, 25 bp, probe
tcaccaacaccagggagaataagag

SEQ ID NO: 284641 - DNA, 25 bp, probe
tcagcggtacgcggcaagcaacaaa

SEQ ID NO: 284642 - DNA, 25 bp, probe
tcagcggtacgcggcaagcaacaaa

SEQ ID NO: 284643 - DNA, 25 bp, probe
tcaccagctatctcgaagaagccta

SEQ ID NO: 284644 - DNA, 25 bp, probe
tcaccagctatctcgaagaagccta

SEQ ID NO: 284645 - DNA, 25 bp, probe
tcaccagccaacctcaagtactgta

SEQ ID NO: 284646 - DNA, 25 bp, probe
tcaccagccatgtcttaaatacatt

SEQ ID NO: 284647 - DNA, 25 bp, probe
tcaccagccatgtcttaaatacatt

SEQ ID NO: 284648 - DNA, 25 bp, probe
tcacccctgcatggtcggaaatctt

SEQ ID NO: 284649 - DNA, 25 bp, probe
tcaccttgcagcagctcgagggaat

SEQ ID NO: 284650 - DNA, 25 bp, probe
tcaccttggcaggccatcagaagaa

SEQ ID NO: 284651 - DNA, 25 bp, probe
tcacctttcacagacagacaataag

SEQ ID NO: 284652 - DNA, 25 bp, probe
tcaactattctcgccgcaaaaacgt

SEQ ID NO: 284653 - DNA, 25 bp, probe
tcaactattctcgccgcaaaaacgt

SEQ ID NO: 284654 - DNA, 25 bp, probe
tcaacatttcttccttaaagctaca

SEQ ID NO: 284655 - DNA, 25 bp, probe
tcaactgtcaccactgctaagggac

SEQ ID NO: 284656 - DNA, 25 bp, probe
tcaagatgtcccaggtcctgggaag

SEQ ID NO: 284657 - DNA, 25 bp, probe
tcacctctcccaaggtacttcaaag

SEQ ID NO: 284658 - DNA, 25 bp, probe
tcacctctcccaaggtacttcaaag

SEQ ID NO: 284659 - DNA, 25 bp, probe
tcaccccattgattggtagttcgaa

SEQ ID NO: 284660 - DNA, 25 bp, probe
tcagccaccaggctttggcttctga

SEQ ID NO: 284661 - DNA, 25 bp, probe
tcagccagcctgtggtgtgacctgg

SEQ ID NO: 284662 - DNA, 25 bp, probe
tcagccacccctggttacaggagta

SEQ ID NO: 284663 - DNA, 25 bp, probe
tcagccacccctggttacaggagta

SEQ ID NO: 284664 - DNA, 25 bp, probe
tcagccacccgagattgagcaataa

SEQ ID NO: 284665 - DNA, 25 bp, probe
tcacccacccaccaatgtgaatatc

SEQ ID NO: 284666 - DNA, 25 bp, probe
tcaccacggtgctgacgatgaccac

SEQ ID NO: 284667 - DNA, 25 bp, probe
tcaccatcgagggagtgctggacca

SEQ ID NO: 284668 - DNA, 25 bp, probe
tcaccacagtggaagagcggaaaca

SEQ ID NO: 284669 - DNA, 25 bp, probe
tcactcatccaggaactggggaaca

SEQ ID NO: 284670 - DNA, 25 bp, probe
tactcacccttgtggacgaagcaat

SEQ ID NO: 284671 - DNA, 25 bp, probe
tcactgagctgggtgtaggaggggc

SEQ ID NO: 284672 - DNA, 25 bp, probe
tcactgatgcgggctcatagggagc

SEQ ID NO: 284673 - DNA, 25 bp, probe
tcactgatgcgggctcatagggagc

SEQ ID NO: 284674 - DNA, 25 bp, probe
tactcagcagaccatgaaagggcgt

SEQ ID NO: 284675 - DNA, 25 bp, probe
tacatgccaacataaatatggcgat

SEQ ID NO: 284676 - DNA, 25 bp, probe
tcacttactaaatatagtggatata

SEQ ID NO: 284677 - DNA, 25 bp, probe
tcacttgaatgagaaacgtgtttag

SEQ ID NO: 284678 - DNA, 25 bp, probe
tcacatcgccgataaccaggattta

SEQ ID NO: 284679 - DNA, 25 bp, probe
tcacaccatcacctatacgggttgc

SEQ ID NO: 284680 - DNA, 25 bp, probe
tcacactaagtcttctggaggttct

SEQ ID NO: 284681 - DNA, 25 bp, probe
tcaaatacccttctgtggtcctaat

SEQ ID NO: 284682 - DNA, 25 bp, probe
tcaacaagtttgccctgggtcctag

SEQ ID NO: 284683 - DNA, 25 bp, probe
taaacttattggctgttacgtggga

SEQ ID NO: 284684 - DNA, 25 bp, probe
tcaaactttggacagatttcgggat

SEQ ID NO: 284685 - DNA, 25 bp, probe
taagactttggccgaaatttctaca

SEQ ID NO: 284686 - DNA, 25 bp, probe
taaagtttaggtaacatctcctgaa

SEQ ID NO: 284687 - DNA, 25 bp, probe
taatttatatagtgaccaccgtgga

SEQ ID NO: 284688 - DNA, 25 bp, probe
taatttatccacggcactccgcgag

SEQ ID NO: 284689 - DNA, 25 bp, probe
taatatacagcctctccaacggcgt

SEQ ID NO: 284690 - DNA, 25 bp, probe
tcaaaaccctccttgaattgggctg

SEQ ID NO: 284691 - DNA, 25 bp, probe
tcaaaacctttgtgttcgaggagac

SEQ ID NO: 284692 - DNA, 25 bp, probe
taaaagtttatggctgttagttaca

SEQ ID NO: 284693 - DNA, 25 bp, probe
taataattctaccctgtattttata

SEQ ID NO: 284694 - DNA, 25 bp, probe
taatcctttcagtggtttttgtgtt

SEQ ID NO: 284695 - DNA, 25 bp, probe
taatccttagtgagggtgccctggt

SEQ ID NO: 284696 - DNA, 25 bp, probe
tcaaccccaggcacgaatgggcgga

SEQ ID NO: 284697 - DNA, 25 bp, probe
tcaacccctccaaaggaggccctgc

SEQ ID NO: 284698 - DNA, 25 bp, probe
tcaacccctccaaaggaggccctgc

SEQ ID NO: 284699 - DNA, 25 bp, probe
taatacttcttcaaaagtggctcct

SEQ ID NO: 284700 - DNA, 25 bp, probe
tcaaacttctgtgcacaaagtgctc

SEQ ID NO: 284701 - DNA, 25 bp, probe
tcaacttagttcccaaaatgagcct

SEQ ID NO: 284702 - DNA, 25 bp, probe
tcaacttcaagtttcagcaactacc

SEQ ID NO: 284703 - DNA, 25 bp, probe
tcaactcgggcgtattcaacaacca

SEQ ID NO: 284704 - DNA, 25 bp, probe
tcaagtcgggaactccataccgaac

SEQ ID NO: 284705 - DNA, 25 bp, probe
tcacattgcggtgatgtaccctctg

SEQ ID NO: 284706 - DNA, 25 bp, probe
tcacttagcagttctggttcctctg

SEQ ID NO: 284707 - DNA, 25 bp, probe
tcacacacaggtttggttcacacat

SEQ ID NO: 284708 - DNA, 25 bp, probe
tcagccaatgtggggggtcctgaag

SEQ ID NO: 284709 - DNA, 25 bp, probe
tcagcctgtgtggggtggagccaaa

SEQ ID NO: 284710 - DNA, 25 bp, probe
tcacctggagggttggacccactca

SEQ ID NO: 284711 - DNA, 25 bp, probe
tcaccctggggctaggaaatccagg

SEQ ID NO: 284712 - DNA, 25 bp, probe
tcaacctggggttcgaaatcagtga

SEQ ID NO: 284713 - DNA, 25 bp, probe
tcaaaatgggggtccagggcactga

SEQ ID NO: 284714 - DNA, 25 bp, probe
tcaaccacgtggcccacatgggccc

SEQ ID NO: 284715 - DNA, 25 bp, probe
tcaccaagctgaaaccctggtgccc

SEQ ID NO: 284716 - DNA, 25 bp, probe
tcaccaattcatacaccgggacttg

SEQ ID NO: 284717 - DNA, 25 bp, probe
tcaaaatttaaccgctgcgcaccag

SEQ ID NO: 284718 - DNA, 25 bp, probe
tcacaaattgcaaatccgctagaaa

SEQ ID NO: 284719 - DNA, 25 bp, probe
tcacaagtgcgaagtctggtaagga

SEQ ID NO: 284720 - DNA, 25 bp, probe
tcacatggctgggtgcagtggctca

SEQ ID NO: 284721 - DNA, 25 bp, probe
tcacggctgcatgcgctgtgagccg

SEQ ID NO: 284722 - DNA, 25 bp, probe
tcacgtgcatttgctatgtgccgtc

SEQ ID NO: 284723 - DNA, 25 bp, probe
tcacctgcattgccgttgatcggta

SEQ ID NO: 284724 - DNA, 25 bp, probe
tcaccattatggctcatgaccgcta

SEQ ID NO: 284725 - DNA, 25 bp, probe
tcactgctgtatggactcatccacc

SEQ ID NO: 284726 - DNA, 25 bp, probe
tcactgagtcagtcaactccatccg

SEQ ID NO: 284727 - DNA, 25 bp, probe
tcactaacagctccctgaatccagt

SEQ ID NO: 284728 - DNA, 25 bp, probe
tcactaacagctccctgaatccagt

SEQ ID NO: 284729 - DNA, 25 bp, probe
tcacgacaaggatatgatgtccgct

SEQ ID NO: 284730 - DNA, 25 bp, probe
taaggattgcctttgtagttaatgt

SEQ ID NO: 284731 - DNA, 25 bp, probe
taaggattgcctttgtagttaatgt

SEQ ID NO: 284732 - DNA, 25 bp, probe
taatgcgttcccagtcatttcagtg

SEQ ID NO: 284733 - DNA, 25 bp, probe
taatgcgttcccagtcatttcagtg

SEQ ID NO: 284734 - DNA, 25 bp, probe
tcaatggtgtctgcaccttcttcac

SEQ ID NO: 284735 - DNA, 25 bp, probe
tcacaggctgatttccacaggcttc

SEQ ID NO: 284736 - DNA, 25 bp, probe
tcaccctgcaaggcatcatcagctg

SEQ ID NO: 284737 - DNA, 25 bp, probe
tcagcctctgcaaggcactcagggt

SEQ ID NO: 284738 - DNA, 25 bp, probe
tcacttgtgctgtgcaccaggcaga

SEQ ID NO: 284739 - DNA, 25 bp, probe
tcacttcactgaatgaggaggctga

SEQ ID NO: 284740 - DNA, 25 bp, probe
tcacatccctgtagtgccaactgaa

SEQ ID NO: 284741 - DNA, 25 bp, probe
tcacagcctcatcattagcaacttt

SEQ ID NO: 284742 - DNA, 25 bp, probe
tcacagcctcatcattagcaacttt

SEQ ID NO: 284743 - DNA, 25 bp, probe
tcacgcagtccattttcatttgtct

SEQ ID NO: 284744 - DNA, 25 bp, probe
tcaccctctattatatgcattcact

SEQ ID NO: 284745 - DNA, 25 bp, probe
tcaaccatttgttttcagtcagatt

SEQ ID NO: 284746 - DNA, 25 bp, probe
tcaacactgtctctcaatcagatca

SEQ ID NO: 284747 - DNA, 25 bp, probe
tcacctctgcctcaatgtgaatcag

SEQ ID NO: 284748 - DNA, 25 bp, probe
tcacctgcattgttaatgctaccat

SEQ ID NO: 284749 - DNA, 25 bp, probe
tcacatgtagctttcaggctcacca

SEQ ID NO: 284750 - DNA, 25 bp, probe
tcacatataagacaggatcaaacct

SEQ ID NO: 284751 - DNA, 25 bp, probe
taataaagcaatcgcaaaaaccttt

SEQ ID NO: 284752 - DNA, 25 bp, probe
taataaatgcacggctttacctttc

SEQ ID NO: 284753 - DNA, 25 bp, probe
taatcaaatatcgctttacatgttc

SEQ ID NO: 284754 - DNA, 25 bp, probe
tcaaatgttatccttgttcctgtta

SEQ ID NO: 284755 - DNA, 25 bp, probe
tcacatatttgtttagttctgggaa

SEQ ID NO: 284756 - DNA, 25 bp, probe
tcacatattggaaaagtgcttttta

SEQ ID NO: 284757 - DNA, 25 bp, probe
tcactgttgtacacagtctgttttc

SEQ ID NO: 284758 - DNA, 25 bp, probe
tcaatttgtccttcagtagttggcc

SEQ ID NO: 284759 - DNA, 25 bp, probe
tcaatttgtccttcagtagttggcc

SEQ ID NO: 284760 - DNA, 25 bp, probe
taatttgacttctgacatgttggca

SEQ ID NO: 284761 - DNA, 25 bp, probe
tcaccttgactgtcctgcagtgttg

SEQ ID NO: 284762 - DNA, 25 bp, probe
tcaccatcttggttgttgtgcttgt

SEQ ID NO: 284763 - DNA, 25 bp, probe
tcacctttggctcgacatgtgcttg

SEQ ID NO: 284764 - DNA, 25 bp, probe
tcaacttgttcggaagtgtcttcct

SEQ ID NO: 284765 - DNA, 25 bp, probe
tcaagtgttacctaacaatgttttt

SEQ ID NO: 284766 - DNA, 25 bp, probe
tcaagtgttacctaacaatgttttt

SEQ ID NO: 284767 - DNA, 25 bp, probe
tcaagtcgacatctaacgttttatc

SEQ ID NO: 284768 - DNA, 25 bp, probe
taaggtgcacttttggagtttttct

SEQ ID NO: 284769 - DNA, 25 bp, probe
tacgactgcctatcgggatatttta

SEQ ID NO: 284770 - DNA, 25 bp, probe
tcacgaatgccaaatctgaatgatt

SEQ ID NO: 284771 - DNA, 25 bp, probe
tcactaagccctacataggattctc

SEQ ID NO: 284772 - DNA, 25 bp, probe
tcagccagtctccgagagcggattg

SEQ ID NO: 284773 - DNA, 25 bp, probe
tcaccattccagcctgggatatctg

SEQ ID NO: 284774 - DNA, 25 bp, probe
tcactatctccagctcagagtttga

SEQ ID NO: 284775 - DNA, 25 bp, probe
tcacttcagccagcgacgtttggag

SEQ ID NO: 284776 - DNA, 25 bp, probe
tcacaggcactctacgaagtttcta

SEQ ID NO: 284777 - DNA, 25 bp, probe
tcactgccacccagaagactgtgga

SEQ ID NO: 284778 - DNA, 25 bp, probe
tcacccatgtactgcaagtctgagg

SEQ ID NO: 284779 - DNA, 25 bp, probe
tcaccgagtatgtgcgggcgcagta

SEQ ID NO: 284780 - DNA, 25 bp, probe
tcacttgatgtaacctggaaactat

SEQ ID NO: 284781 - DNA, 25 bp, probe
tcacttttgcagattgggtaacaca

SEQ ID NO: 284782 - DNA, 25 bp, probe
tcaatttgtcaaaacggtacagcta

SEQ ID NO: 284783 - DNA, 25 bp, probe
tcaatttgtcaaaacggtacagcta

SEQ ID NO: 284784 - DNA, 25 bp, probe
tcaacttgaagacaccgtatgaggt

SEQ ID NO: 284785 - DNA, 25 bp, probe
taagcttaaagctaacttaatgtca

SEQ ID NO: 284786 - DNA, 25 bp, probe
taagttgaactacatttgttgatcc

SEQ ID NO: 284787 - DNA, 25 bp, probe
tcaagagttaccctttggggctcct

SEQ ID NO: 284788 - DNA, 25 bp, probe
tcaaggtctccgccttgtaaaacca

SEQ ID NO: 284789 - DNA, 25 bp, probe
tcaaatgccccgaatttagtcacac

SEQ ID NO: 284790 - DNA, 25 bp, probe
tcaaatggccagactatttcattaa

SEQ ID NO: 284791 - DNA, 25 bp, probe
tcacattccctgactttgtaacaga

SEQ ID NO: 284792 - DNA, 25 bp, probe
tcacattccctgactttgtaacaga

SEQ ID NO: 284793 - DNA, 25 bp, probe
tatttccctttgtgtaaggactaag

SEQ ID NO: 284794 - DNA, 25 bp, probe
ttagctcccttttaaaaggagcaca

SEQ ID NO: 284795 - DNA, 25 bp, probe
taacctgcttttttgaaaggaaatg

SEQ ID NO: 284796 - DNA, 25 bp, probe
tagacccccgctttaacacggagat

SEQ ID NO: 284797 - DNA, 25 bp, probe
tcaagcccgccgacaagaacaaggg

SEQ ID NO: 284798 - DNA, 25 bp, probe
tcaacgccgactacaggaagaagca

SEQ ID NO: 284799 - DNA, 25 bp, probe
tcaccgcctgctacacaggcaggaa

SEQ ID NO: 284800 - DNA, 25 bp, probe
tcacctcctcttcatgtgatgtgga

SEQ ID NO: 284801 - DNA, 25 bp, probe
tcaccctctattccttgatagcgga

SEQ ID NO: 284802 - DNA, 25 bp, probe
tcaccctctattccttgatagcgga

SEQ ID NO: 284803 - DNA, 25 bp, probe
tcaccctctaccatctgtaaacaac

SEQ ID NO: 284804 - DNA, 25 bp, probe
tcaaccagtacccttacatataaac

SEQ ID NO: 284805 - DNA, 25 bp, probe
tcaaagaatgaggcctccaaacaaa

SEQ ID NO: 284806 - DNA, 25 bp, probe
tcaaaggcattcgccacgacatcac

SEQ ID NO: 284807 - DNA, 25 bp, probe
tcaaaggcattcgccacgacatcac

SEQ ID NO: 284808 - DNA, 25 bp, probe
tcaacagccttcgcaacaaagaggt

SEQ ID NO: 284809 - DNA, 25 bp, probe
tcaaacttcctggtaactcaaggct

SEQ ID NO: 284810 - DNA, 25 bp, probe
tcaagaccccttcaggcatcaagtt

SEQ ID NO: 284811 - DNA, 25 bp, probe
taatacttgcaactaaggacaaatt

SEQ ID NO: 284812 - DNA, 25 bp, probe
tcaaacctcagcccgaggaaacatg

SEQ ID NO: 284813 - DNA, 25 bp, probe
tcaaaggccaggcccagtcaacgct

SEQ ID NO: 284814 - DNA, 25 bp, probe
tcaaggtgaagtcctctggaatccg

SEQ ID NO: 284815 - DNA, 25 bp, probe
tcaatgagctgaagccagctgtgga

SEQ ID NO: 284816 - DNA, 25 bp, probe
tcaccgcagacacgcactgttgatt

SEQ ID NO: 284817 - DNA, 25 bp, probe
tcacaggggacccgttgatatctgg

SEQ ID NO: 284818 - DNA, 25 bp, probe
tcacaggaggagacgcgtttcgcgc

SEQ ID NO: 284819 - DNA, 25 bp, probe
tcacaggaggagacgcgtttcgcgc

SEQ ID NO: 284820 - DNA, 25 bp, probe
tcacagggcaggacgaagccatccg

SEQ ID NO: 284821 - DNA, 25 bp, probe
tcaccgagcgcggctacagcttcac

SEQ ID NO: 284822 - DNA, 25 bp, probe
tcactcacacgatctctggtatcac

SEQ ID NO: 284823 - DNA, 25 bp, probe
tcaccagacaaactctgtgctcctc

SEQ ID NO: 284824 - DNA, 25 bp, probe
tcaccatgaaaaactggtccaaatg

SEQ ID NO: 284825 - DNA, 25 bp, probe
tcaccatgaaaaactggtccaaatg

SEQ ID NO: 284826 - DNA, 25 bp, probe
tcacggaaagcatcctctccaaagt

SEQ ID NO: 284827 - DNA, 25 bp, probe
tcacggagaagtccgcctgtaagag

SEQ ID NO: 284828 - DNA, 25 bp, probe
tcacgggccagctcaagctgtacaa

SEQ ID NO: 284829 - DNA, 25 bp, probe
tcactagggcagggacaggataaga

SEQ ID NO: 284830 - DNA, 25 bp, probe
tcaaagacgaggtaaggtgcaagtg

SEQ ID NO: 284831 - DNA, 25 bp, probe
tcacaaggtgaagaactggaacccc

SEQ ID NO: 284832 - DNA, 25 bp, probe
tcaaaggaaaccacggagtgcccag

SEQ ID NO: 284833 - DNA, 25 bp, probe
tcacaggcagcaaacctcctgggtt

SEQ ID NO: 284834 - DNA, 25 bp, probe
tcacaggcagcaaacctcctgggtt

SEQ ID NO: 284835 - DNA, 25 bp, probe
tcacagccaaatgcttccatttgta

SEQ ID NO: 284836 - DNA, 25 bp, probe
tcaaggaaacctaccttttgatcct

SEQ ID NO: 284837 - DNA, 25 bp, probe
taataaaacctgtgcttgatctgac

SEQ ID NO: 284838 - DNA, 25 bp, probe
tactaaaggttgtgttgcctgctaa

SEQ ID NO: 284839 - DNA, 25 bp, probe
taacaaagcgggctttgccgtcaac

SEQ ID NO: 284840 - DNA, 25 bp, probe
tcaacaaccgagccttttgcaacta

SEQ ID NO: 284841 - DNA, 25 bp, probe
tcaagcatcccaaccttgttaacct

SEQ ID NO: 284842 - DNA, 25 bp, probe
tcaactcgccggtaggtaacatccc

SEQ ID NO: 284843 - DNA, 25 bp, probe
tcaactcgccggtaggtaacatccc

SEQ ID NO: 284844 - DNA, 25 bp, probe
tcaacctctcggtagtagatctcct

SEQ ID NO: 284845 - DNA, 25 bp, probe
tcaaaggccttaagtacatccactc

SEQ ID NO: 284846 - DNA, 25 bp, probe
taatcagtccttattatcccagctt

SEQ ID NO: 284847 - DNA, 25 bp, probe
tcaaaatcactgattttggtctgtc

SEQ ID NO: 284848 - DNA, 25 bp, probe
tcaacagatgatagtccaattttta

SEQ ID NO: 284849 - DNA, 25 bp, probe
tcaacagatgatagtccaattttta

SEQ ID NO: 284850 - DNA, 25 bp, probe
taattgcatctaggtaatttttacc

SEQ ID NO: 284851 - DNA, 25 bp, probe
tcacttgttaagagttatttatacc

SEQ ID NO: 284852 - DNA, 25 bp, probe
tcacttcttaaaaagctactcgaac

SEQ ID NO: 284853 - DNA, 25 bp, probe
tcacccttaaaatatttcagcagac

SEQ ID NO: 284854 - DNA, 25 bp, probe
tcacctcgctcaggagaaacctcgg

SEQ ID NO: 284855 - DNA, 25 bp, probe
tcactctactctggatgaggacctg

SEQ ID NO: 284856 - DNA, 25 bp, probe
tcacatctagccaagccagtgacct

SEQ ID NO: 284857 - DNA, 25 bp, probe
tcacactgagccagaaggtcttctc

SEQ ID NO: 284858 - DNA, 25 bp, probe
tcaccatagccttacagcttttctc

SEQ ID NO: 284859 - DNA, 25 bp, probe
tcactacagcctaaagccttgcctt

SEQ ID NO: 284860 - DNA, 25 bp, probe
tcactaatgctcaacaatttatcca

SEQ ID NO: 284861 - DNA, 25 bp, probe
tcactaatgctcaacaatttatcca

SEQ ID NO: 284862 - DNA, 25 bp, probe
tcacctgatgtcaaccttgtgaccc

SEQ ID NO: 284863 - DNA, 25 bp, probe
tcactctggtgaaactgttcctctc

SEQ ID NO: 284864 - DNA, 25 bp, probe
tcaccatggagatgcagtgtccccc

SEQ ID NO: 284865 - DNA, 25 bp, probe
tcaccatgggtgccaggatgcttcg

SEQ ID NO: 284866 - DNA, 25 bp, probe
tcaccatgttggccaggatgatctc

SEQ ID NO: 284867 - DNA, 25 bp, probe
tcaccatgttcttcgccatgatgct

SEQ ID NO: 284868 - DNA, 25 bp, probe
tcaccatgttcttcgccatgatgct

SEQ ID NO: 284869 - DNA, 25 bp, probe
tcacctgtacttggtcatgcagctg

SEQ ID NO: 284870 - DNA, 25 bp, probe
tcactgctgtggttgcagccacagg

SEQ ID NO: 284871 - DNA, 25 bp, probe
tcacgagcatcgatgcacacaatgg

SEQ ID NO: 284872 - DNA, 25 bp, probe
tcacatagcattgatcattgaactg

SEQ ID NO: 284873 - DNA, 25 bp, probe
tcacaagcttgatctaagactggaa

SEQ ID NO: 284874 - DNA, 25 bp, probe
taaagttgatcccaagcctgggcgc

SEQ ID NO: 284875 - DNA, 25 bp, probe
tcaaagaattcccaacgccaggacc

SEQ ID NO: 284876 - DNA, 25 bp, probe
tcaaagaggtgacgtccgtgggacc

SEQ ID NO: 284877 - DNA, 25 bp, probe
tcaaagaggtgacgtccgtgggacc

SEQ ID NO: 284878 - DNA, 25 bp, probe
tcacaaggaggagttacgtagagag

SEQ ID NO: 284879 - DNA, 25 bp, probe
tcacaaggggcagtgggctcttggg

SEQ ID NO: 284880 - DNA, 25 bp, probe
tcaccgaggctgggagatccttcgt

SEQ ID NO: 284881 - DNA, 25 bp, probe
tcacgcgcaggtgacggccttagat

SEQ ID NO: 284882 - DNA, 25 bp, probe
tcaccgcatggacaagcccagtaac

SEQ ID NO: 284883 - DNA, 25 bp, probe
tcaccgtggttgggccacagaagaa

SEQ ID NO: 284884 - DNA, 25 bp, probe
tcacctggtgtgccggatcggcgat

SEQ ID NO: 284885 - DNA, 25 bp, probe
tcacctggtgtgccggatcggcgat

SEQ ID NO: 284886 - DNA, 25 bp, probe
tcacaatgtggccgaggactttgat

SEQ ID NO: 284887 - DNA, 25 bp, probe
tcacagccgtgctggctgactttgg

SEQ ID NO: 284888 - DNA, 25 bp, probe
tcacatccggctcacatattttggc

SEQ ID NO: 284889 - DNA, 25 bp, probe
tcacatccaagacagattcctggtc

SEQ ID NO: 284890 - DNA, 25 bp, probe
tcacagccagaacattctgccggtg

SEQ ID NO: 284891 - DNA, 25 bp, probe
tcacgggcaagatcctgcctgttgg

SEQ ID NO: 284892 - DNA, 25 bp, probe
ttagggcagaaccctacttggcctg

SEQ ID NO: 284893 - DNA, 25 bp, probe
ttagggcagaaccctacttggcctg

SEQ ID NO: 284894 - DNA, 25 bp, probe
ttacggctaccagcaacagggcttg

SEQ ID NO: 284895 - DNA, 25 bp, probe
tttgggcaacgagaccgatcctcat

SEQ ID NO: 284896 - DNA, 25 bp, probe
tttgcagtaagggacccgaacactg

SEQ ID NO: 284897 - DNA, 25 bp, probe
ttgaggttaggaacccggcatgccg

SEQ ID NO: 284898 - DNA, 25 bp, probe
tcaagtggtacgcacccgaatgcat

SEQ ID NO: 284899 - DNA, 25 bp, probe
tcaactggtagacgctcccaagaag

SEQ ID NO: 284900 - DNA, 25 bp, probe
tcacagctaaggagcatgcccatca

SEQ ID NO: 284901 - DNA, 25 bp, probe
tcacaggaagatatcatgccccacc

SEQ ID NO: 284902 - DNA, 25 bp, probe
tcacaggaagatatcatgccccacc

SEQ ID NO: 284903 - DNA, 25 bp, probe
tcacactgcaagtgaatcctgcaac

SEQ ID NO: 284904 - DNA, 25 bp, probe
tcacaatgatggtgcagtctgcaga

SEQ ID NO: 284905 - DNA, 25 bp, probe
tcacaatgatggtgcagtctgcaga

SEQ ID NO: 284906 - DNA, 25 bp, probe
tcacagagacctagcagcacgcaac

SEQ ID NO: 284907 - DNA, 25 bp, probe
tcacagagctgaccaagaccatatc

SEQ ID NO: 284908 - DNA, 25 bp, probe
tcacctgttggaatgcactaatgtt

SEQ ID NO: 284909 - DNA, 25 bp, probe
tcactctgttgcccaggctggagtg

SEQ ID NO: 284910 - DNA, 25 bp, probe
tcacctgctgtccaaagatggcatc

SEQ ID NO: 284911 - DNA, 25 bp, probe
tcacacgctacaccaagaagacctc

SEQ ID NO: 284912 - DNA, 25 bp, probe
tcacacgctacaccaagaagacctc

SEQ ID NO: 284913 - DNA, 25 bp, probe
tcaatcccaacaaagacatactcca

SEQ ID NO: 284914 - DNA, 25 bp, probe
tcaatcaaacagggacactacaaac

SEQ ID NO: 284915 - DNA, 25 bp, probe
tcaacaagtgggcacctgcactacc

SEQ ID NO: 284916 - DNA, 25 bp, probe
tcaacatcgtggggaccacctatcc

SEQ ID NO: 284917 - DNA, 25 bp, probe
tcaacatgcagggcgagcccacggc

SEQ ID NO: 284918 - DNA, 25 bp, probe
tcaacctggtcgtcctcaggttctt

SEQ ID NO: 284919 - DNA, 25 bp, probe
tcaacctggtcgtcctcaggttctt

SEQ ID NO: 284920 - DNA, 25 bp, probe
tcactcagggtcaatactcagggtc

SEQ ID NO: 284921 - DNA, 25 bp, probe
tcactccggaaccaccatgggtggc

SEQ ID NO: 284922 - DNA, 25 bp, probe
tcacgtcggagactgacaccaggta

SEQ ID NO: 284923 - DNA, 25 bp, probe
tcacacacgcgggtgcaccgcgagt

SEQ ID NO: 284924 - DNA, 25 bp, probe
tcacacacgcgggtgcaccgcgagt

SEQ ID NO: 284925 - DNA, 25 bp, probe
tcaagccccgaaacacagcagagct

SEQ ID NO: 284926 - DNA, 25 bp, probe
tcaactcctatgcataaagctgctg

SEQ ID NO: 284927 - DNA, 25 bp, probe
tcaaattctagtaataggctttttt

SEQ ID NO: 284928 - DNA, 25 bp, probe
tcaataccttgtttaggatttcttc

SEQ ID NO: 284929 - DNA, 25 bp, probe
tcacaggcagctctttggtgttttg

SEQ ID NO: 284930 - DNA, 25 bp, probe
tcactggcctgcaattttctggtgt

SEQ ID NO: 284931 - DNA, 25 bp, probe
tcacttttgtttcatctggattctc

SEQ ID NO: 284932 - DNA, 25 bp, probe
tacttttccttgatagggtgctgcc

SEQ ID NO: 284933 - DNA, 25 bp, probe
tacttgaactactgtcgtgggctgc

SEQ ID NO: 284934 - DNA, 25 bp, probe
taatataactactgtttccatgtcc

SEQ ID NO: 284935 - DNA, 25 bp, probe
taatgcagagttttttttccgtgaa

SEQ ID NO: 284936 - DNA, 25 bp, probe
tcaaggagagggttttggccgctcc

SEQ ID NO: 284937 - DNA, 25 bp, probe
tcaaggagagggttttggccgctcc

SEQ ID NO: 284938 - DNA, 25 bp, probe
tcaaggagagggttttggccgctcc

SEQ ID NO: 284939 - DNA, 25 bp, probe
tcaaaagcaaacttcgaagccgccc

SEQ ID NO: 284940 - DNA, 25 bp, probe
tcaaaagcaaacttcgaagccgccc

SEQ ID NO: 284941 - DNA, 25 bp, probe
tcacaacaataacctccatagcacc

SEQ ID NO: 284942 - DNA, 25 bp, probe
tcactaccaacagcctcatgtgcac

SEQ ID NO: 284943 - DNA, 25 bp, probe
tcactttaccagctgcatattgcac

SEQ ID NO: 284944 - DNA, 25 bp, probe
tcacccttgtcagtgtctattgcac

SEQ ID NO: 284945 - DNA, 25 bp, probe
tcactctctttgcgctgatgttgac

SEQ ID NO: 284946 - DNA, 25 bp, probe
tcactgttttgcatctctgttgacc

SEQ ID NO: 284947 - DNA, 25 bp, probe
tcactgttttgcatctctgttgacc

SEQ ID NO: 284948 - DNA, 25 bp, probe
tcactgttttattctagcaatgaat

SEQ ID NO: 284949 - DNA, 25 bp, probe
tcactggttttttatgactatcatt

SEQ ID NO: 284950 - DNA, 25 bp, probe
tcacaggattgtaattagtcttgtt

SEQ ID NO: 284951 - DNA, 25 bp, probe
tcacatgtattaaattcttctgtct

SEQ ID NO: 284952 - DNA, 25 bp, probe
tcactgttgtagcttctgttgtgat

SEQ ID NO: 284953 - DNA, 25 bp, probe
tcactgtatgtccttggtgcctgga

SEQ ID NO: 284954 - DNA, 25 bp, probe
tcacgtagattctggtgcatctgca

SEQ ID NO: 284955 - DNA, 25 bp, probe
tcactgggtgactgtctgacccgtc

SEQ ID NO: 284956 - DNA, 25 bp, probe
tcactgggtgactgtctgacccgtc

SEQ ID NO: 284957 - DNA, 25 bp, probe
taaggagaagctgtgctacgtcgcc

SEQ ID NO: 284958 - DNA, 25 bp, probe
ttaggaaatgctgttaacctggcag

SEQ ID NO: 284959 - DNA, 25 bp, probe
ttcgagctcaacggtttaccctcgg

SEQ ID NO: 284960 - DNA, 25 bp, probe
ttagaacaagaaccttaccttcaag

SEQ ID NO: 284961 - DNA, 25 bp, probe
tataaactataaacttaagggcaag

SEQ ID NO: 284962 - DNA, 25 bp, probe
taaaaatagtaaatctccaaggaag

SEQ ID NO: 284963 - DNA, 25 bp, probe
taaacccttaactggcataggaaat

SEQ ID NO: 284964 - DNA, 25 bp, probe
taaaacggatcaacttggaaaaatg

SEQ ID NO: 284965 - DNA, 25 bp, probe
tatgaaacggattactaccggaaag

SEQ ID NO: 284966 - DNA, 25 bp, probe
tcaaacatctggaaattaccttaat

SEQ ID NO: 284967 - DNA, 25 bp, probe
tataacttttaatacagtagcctgt

SEQ ID NO: 284968 - DNA, 25 bp, probe
taaggtgtttaaaacatgtcaacct

SEQ ID NO: 284969 - DNA, 25 bp, probe
taacgtctttaccttcgtcaacttg

SEQ ID NO: 284970 - DNA, 25 bp, probe
tatgacgtttgtatttttaggtctt

SEQ ID NO: 284971 - DNA, 25 bp, probe
tacattcctgttattttctgggttt

SEQ ID NO: 284972 - DNA, 25 bp, probe
tcacatttgctctgggttatctggg

SEQ ID NO: 284973 - DNA, 25 bp, probe
taattttaatgcaagtacactggtg

SEQ ID NO: 284974 - DNA, 25 bp, probe
taatttgataccagttgagtagaat

SEQ ID NO: 284975 - DNA, 25 bp, probe
taatctttccctgttaggctgattt

SEQ ID NO: 284976 - DNA, 25 bp, probe
tagtctttggttgcttaactggctg

SEQ ID NO: 284977 - DNA, 25 bp, probe
tcacatctttaacccactaactggc

SEQ ID NO: 284978 - DNA, 25 bp, probe
tcaaattggaaatctgtaacgcagc

SEQ ID NO: 284979 - DNA, 25 bp, probe
tcaacatgctggtgaaggtgaaagg

SEQ ID NO: 284980 - DNA, 25 bp, probe
tcaacagctcacaggagcgtgaacc

SEQ ID NO: 284981 - DNA, 25 bp, probe
tcaacgaagccatacggacatcgac

SEQ ID NO: 284982 - DNA, 25 bp, probe
tcacagaacccatagggaatggagg

SEQ ID NO: 284983 - DNA, 25 bp, probe
tcaagaacccagcggagcgggcgga

SEQ ID NO: 284984 - DNA, 25 bp, probe
tcaagagcaaaggtggggcagggtg

SEQ ID NO: 284985 - DNA, 25 bp, probe
tcaagccatagagttggggcctctg

SEQ ID NO: 284986 - DNA, 25 bp, probe
tcaatgccacggctgtggtgcggca

SEQ ID NO: 284987 - DNA, 25 bp, probe
tcacaccagtggcttggcacttgtg

SEQ ID NO: 284988 - DNA, 25 bp, probe
tcacaccagtggcttggcacttgtg

SEQ ID NO: 284989 - DNA, 25 bp, probe
tcacacctcaggctcgtggtggtgc

SEQ ID NO: 284990 - DNA, 25 bp, probe
tcaactacaagtatgggtggtcgtt

SEQ ID NO: 284991 - DNA, 25 bp, probe
tcacactcaccaccattgggtttgg

SEQ ID NO: 284992 - DNA, 25 bp, probe
tcacactcaccaccattgggtttgg

SEQ ID NO: 284993 - DNA, 25 bp, probe
tcaaacaccccaatctggttcggta

SEQ ID NO: 284994 - DNA, 25 bp, probe
tcaaacacccaaattgtcttcctaa

SEQ ID NO: 284995 - DNA, 25 bp, probe
tcaaacacccaaattgtcttcctaa

SEQ ID NO: 284996 - DNA, 25 bp, probe
taaaggccaaatgctgtttcccaac

SEQ ID NO: 284997 - DNA, 25 bp, probe
taaaggccaaatgctgtttcccaac

SEQ ID NO: 284998 - DNA, 25 bp, probe
ttacaaaaacagatgtttcctagaa

SEQ ID NO: 284999 - DNA, 25 bp, probe
tcaaaggaaaagacaccttgcctat

SEQ ID NO: 285000 - DNA, 25 bp, probe
tcaataagaaaaccacgttaggagc

SEQ ID NO: 285001 - DNA, 25 bp, probe
taataaaaaaccccgcagagagagc

SEQ ID NO: 285002 - DNA, 25 bp, probe
tcacaggaagaaggcccgggaggag

SEQ ID NO: 285003 - DNA, 25 bp, probe
tcaaagggacacctacggcagagaa

SEQ ID NO: 285004 - DNA, 25 bp, probe
tcaacagggagctgagggactgctt

SEQ ID NO: 285005 - DNA, 25 bp, probe
tcaacagggagctgagggactgctt

SEQ ID NO: 285006 - DNA, 25 bp, probe
tcaatcggtgactgtgtgggactta

SEQ ID NO: 285007 - DNA, 25 bp, probe
taataggggcggctcaggcactgag

SEQ ID NO: 285008 - DNA, 25 bp, probe
taatcttaggcgcttcaggcggagt

SEQ ID NO: 285009 - DNA, 25 bp, probe
taatttaggggttatgttgtctgtg

SEQ ID NO: 285010 - DNA, 25 bp, probe
tcaatttatggtcttctgttttgaa

SEQ ID NO: 285011 - DNA, 25 bp, probe
tcaattttcgtgctatttctataaa

SEQ ID NO: 285012 - DNA, 25 bp, probe
tcaaacctcttccagatttctctaa

SEQ ID NO: 285013 - DNA, 25 bp, probe
tcaaacccatcaaaatctacttatt

SEQ ID NO: 285014 - DNA, 25 bp, probe
tcaaacctcctaacttcactgtatt

SEQ ID NO: 285015 - DNA, 25 bp, probe
tcaacctctcctgtgtaactgtgat

SEQ ID NO: 285016 - DNA, 25 bp, probe
tcactggccccagtttcaaatttac

SEQ ID NO: 285017 - DNA, 25 bp, probe
tcactgggcccaacatatccatttt

SEQ ID NO: 285018 - DNA, 25 bp, probe
tcactgggcccaacatatccatttt

SEQ ID NO: 285019 - DNA, 25 bp, probe
tacaggccccaattatccaatagtc

SEQ ID NO: 285020 - DNA, 25 bp, probe
taattcctaaactaccttagctgca

SEQ ID NO: 285021 - DNA, 25 bp, probe
tcaaccctaagagcagccttcagtg

SEQ ID NO: 285022 - DNA, 25 bp, probe
tcaactccatcaagaacagctttct

SEQ ID NO: 285023 - DNA, 25 bp, probe
tcaactgccttataacattgtcaag

SEQ ID NO: 285024 - DNA, 25 bp, probe
tcacacccattacattgtgggaatg

SEQ ID NO: 285025 - DNA, 25 bp, probe
tcacccactcttcatctggttgaag

SEQ ID NO: 285026 - DNA, 25 bp, probe
tactacatccttgtagccttgaagt

SEQ ID NO: 285027 - DNA, 25 bp, probe
tactcctcactgtgtaacttaccta

SEQ ID NO: 285028 - DNA, 25 bp, probe
taatcccctgggtaatctagatact

SEQ ID NO: 285029 - DNA, 25 bp, probe
taattccgataacgaacgagactct

SEQ ID NO: 285030 - DNA, 25 bp, probe
tcacttccctagagaaggcctgcct

SEQ ID NO: 285031 - DNA, 25 bp, probe
tcacttccctagagaaggcctgcct

SEQ ID NO: 285032 - DNA, 25 bp, probe
tcacttctgctaaggagggacccgt

SEQ ID NO: 285033 - DNA, 25 bp, probe
tcacttctgtattcgagggactcta

SEQ ID NO: 285034 - DNA, 25 bp, probe
tcactcttgtttgctatggactcat

SEQ ID NO: 285035 - DNA, 25 bp, probe
tcactcttgtttgctatggactcat

SEQ ID NO: 285036 - DNA, 25 bp, probe
tcactctcgatcgtgttataacaca

SEQ ID NO: 285037 - DNA, 25 bp, probe
tcacttggaccccatacaacatcat

SEQ ID NO: 285038 - DNA, 25 bp, probe
tcactgttcccggaagcacagctaa

SEQ ID NO: 285039 - DNA, 25 bp, probe
tcactttcctgagacatgactgcca

SEQ ID NO: 285040 - DNA, 25 bp, probe
tcacaaccacaatgcatctgactgc

SEQ ID NO: 285041 - DNA, 25 bp, probe
tcacaaccaatgagatctgaaagtt

SEQ ID NO: 285042 - DNA, 25 bp, probe
tcacactctgcattacagtctgaat

SEQ ID NO: 285043 - DNA, 25 bp, probe
tcacagctgactccaagctgcatgg

SEQ ID NO: 285044 - DNA, 25 bp, probe
tcacagcctctgcctatgtgctgat

SEQ ID NO: 285045 - DNA, 25 bp, probe
tcacagctgcccctagtgtgagggc

SEQ ID NO: 285046 - DNA, 25 bp, probe
tcacagcgcctgcagaggtggaggt

SEQ ID NO: 285047 - DNA, 25 bp, probe
tcacagatgctgtgaaggtcgtgga

SEQ ID NO: 285048 - DNA, 25 bp, probe
tcacaatgtattgcataatcaatgc

SEQ ID NO: 285049 - DNA, 25 bp, probe
tcaaggttttcattgacaatataga

SEQ ID NO: 285050 - DNA, 25 bp, probe
tcacagcagtttattaatgtatata

SEQ ID NO: 285051 - DNA, 25 bp, probe
tcacatggcttttctttcaatctta

SEQ ID NO: 285052 - DNA, 25 bp, probe
tcactccttatatttgctcaatttt

SEQ ID NO: 285053 - DNA, 25 bp, probe
tcactgcttgttgtttgcgcatttt

SEQ ID NO: 285054 - DNA, 25 bp, probe
tcacttctctgtctttgccaatagt

SEQ ID NO: 285055 - DNA, 25 bp, probe
tcactgtctctgttggtggtacatc

SEQ ID NO: 285056 - DNA, 25 bp, probe
tcaatcctaattgtggtcctgcctc

SEQ ID NO: 285057 - DNA, 25 bp, probe
tcactactcagcttttggctctgtg

SEQ ID NO: 285058 - DNA, 25 bp, probe
tcactttcatgccatttccattgtt

SEQ ID NO: 285059 - DNA, 25 bp, probe
tcactttcatgccatttccattgtt

SEQ ID NO: 285060 - DNA, 25 bp, probe
tcacttctcactttgcataattgcc

SEQ ID NO: 285061 - DNA, 25 bp, probe
tcactaccagtaccaatgattacca

SEQ ID NO: 285062 - DNA, 25 bp, probe
tagcaaggttaagagatctatccaa

SEQ ID NO: 285063 - DNA, 25 bp, probe
tagcaaggttaagagatctatccaa

SEQ ID NO: 285064 - DNA, 25 bp, probe
tcacaatggtaggggaacttacaaa

SEQ ID NO: 285065 - DNA, 25 bp, probe
tcacaaggtcagttgggccatttca

SEQ ID NO: 285066 - DNA, 25 bp, probe
taattctgtcagtaggggcatggta

SEQ ID NO: 285067 - DNA, 25 bp, probe
tcaacatcgtcaacgtggtgtgccc

SEQ ID NO: 285068 - DNA, 25 bp, probe
tcaaatcgcttttctggctgactat

SEQ ID NO: 285069 - DNA, 25 bp, probe
tcacattcattttagcaggtactga

SEQ ID NO: 285070 - DNA, 25 bp, probe
tcacagctctctggagagggtatct

SEQ ID NO: 285071 - DNA, 25 bp, probe
tcaacttcatggagggtgaccccag

SEQ ID NO: 285072 - DNA, 25 bp, probe
tcaagaggcttgggggtaaggccaa

SEQ ID NO: 285073 - DNA, 25 bp, probe
tcaaaggtgtgggggtcgtggacca

SEQ ID NO: 285074 - DNA, 25 bp, probe
tcaaagggacagggtcctggaccca

SEQ ID NO: 285075 - DNA, 25 bp, probe
tcaaaggctttagccctggacccag

SEQ ID NO: 285076 - DNA, 25 bp, probe
tcaaaggctttagccctggacccag

SEQ ID NO: 285077 - DNA, 25 bp, probe
tcacaatgatgcagtcagccacctg

SEQ ID NO: 285078 - DNA, 25 bp, probe
tcacagcagtgggtaggcccagcag

SEQ ID NO: 285079 - DNA, 25 bp, probe
tcacacacgcgcacatgggcgcgca

SEQ ID NO: 285080 - DNA, 25 bp, probe
tcacaccaggctgtgtgctctggcg

SEQ ID NO: 285081 - DNA, 25 bp, probe
tcacaaccgctccgagcgtgggtct

SEQ ID NO: 285082 - DNA, 25 bp, probe
tcacaaccgctccgagcgtgggtct

SEQ ID NO: 285083 - DNA, 25 bp, probe
tcaaatcatggtgagggctgggctt

SEQ ID NO: 285084 - DNA, 25 bp, probe
tcacaatctattggacaagttatgc

SEQ ID NO: 285085 - DNA, 25 bp, probe
tcactactctgggaaatggtttgtc

SEQ ID NO: 285086 - DNA, 25 bp, probe
tttaatgcgggagctgcgatttaca

SEQ ID NO: 285087 - DNA, 25 bp, probe
taatggggggaactgccttgtgcac

SEQ ID NO: 285088 - DNA, 25 bp, probe
tcaagggggagacctaccagtgcag

SEQ ID NO: 285089 - DNA, 25 bp, probe
tttggggctgaacttaccatggaga

SEQ ID NO: 285090 - DNA, 25 bp, probe
ttgggccggaagatccatatggatg

SEQ ID NO: 285091 - DNA, 25 bp, probe
tcactgaccggatggccactaggtc

SEQ ID NO: 285092 - DNA, 25 bp, probe
tcacgtccgaggtcgacacaaggta

SEQ ID NO: 285093 - DNA, 25 bp, probe
tcacgtccgaggtcgacacaaggta

SEQ ID NO: 285094 - DNA, 25 bp, probe
tcacgtccgaggtcgacacaaggta

SEQ ID NO: 285095 - DNA, 25 bp, probe
taccgctttggtgacctcagcgtga

SEQ ID NO: 285096 - DNA, 25 bp, probe
tcactcgccttggggttctgcgagt

SEQ ID NO: 285097 - DNA, 25 bp, probe
taacgcgttcgcagttgcagcgatt

SEQ ID NO: 285098 - DNA, 25 bp, probe
taactcgtgtcccgaactggtgttg

SEQ ID NO: 285099 - DNA, 25 bp, probe
taactcgtgtcccgaactggtgttg

SEQ ID NO: 285100 - DNA, 25 bp, probe
tcaacccatggtgggacacggagtt

SEQ ID NO: 285101 - DNA, 25 bp, probe
tcaacccattggctggcagcccaag

SEQ ID NO: 285102 - DNA, 25 bp, probe
tcaactggcaggacgtggtccagaa

SEQ ID NO: 285103 - DNA, 25 bp, probe
tcaactggcaggacgtggtccagaa

SEQ ID NO: 285104 - DNA, 25 bp, probe
tcaactggactttggcctacaattt

SEQ ID NO: 285105 - DNA, 25 bp, probe
tcaacgccaccttcatggcattcaa

SEQ ID NO: 285106 - DNA, 25 bp, probe
tcaacccaactgaagcatttcaatt

SEQ ID NO: 285107 - DNA, 25 bp, probe
tcaacctcagcacctactttgaaag

SEQ ID NO: 285108 - DNA, 25 bp, probe
tcaacctcagcacctactttgaaag

SEQ ID NO: 285109 - DNA, 25 bp, probe
taatagctcacagcacatttgttaa

SEQ ID NO: 285110 - DNA, 25 bp, probe
taatagctcacagcacatttgttaa

SEQ ID NO: 285111 - DNA, 25 bp, probe
tcacaagtacagtcctttccaacac

SEQ ID NO: 285112 - DNA, 25 bp, probe
tcacacagttcatcataacccaacc

SEQ ID NO: 285113 - DNA, 25 bp, probe
tcacagaatactaaagcacctcaaa

SEQ ID NO: 285114 - DNA, 25 bp, probe
tcaaagtcagtaagccaagaaaaac

SEQ ID NO: 285115 - DNA, 25 bp, probe
tcaaagtcagtcatgaagaaaacat

SEQ ID NO: 285116 - DNA, 25 bp, probe
tcaacctcatccagacagaacgaca

SEQ ID NO: 285117 - DNA, 25 bp, probe
tcaacccaaccaacaggactgactg

SEQ ID NO: 285118 - DNA, 25 bp, probe
taacctcaaccttctggactcaagg

SEQ ID NO: 285119 - DNA, 25 bp, probe
tcaaatgccagcgctattggcccaa

SEQ ID NO: 285120 - DNA, 25 bp, probe
tcaaggcaacggccttccatctgaa

SEQ ID NO: 285121 - DNA, 25 bp, probe
tcaaagcatgtcagtttccttaata

SEQ ID NO: 285122 - DNA, 25 bp, probe
tcacaacagattattaccttacaga

SEQ ID NO: 285123 - DNA, 25 bp, probe
tcacaaagtgttcttcctcatggaa

SEQ ID NO: 285124 - DNA, 25 bp, probe
tcacatagagtgatctttcccaaga

SEQ ID NO: 285125 - DNA, 25 bp, probe
tcactgagacttttgcctcacctaa

SEQ ID NO: 285126 - DNA, 25 bp, probe
tcactgagacttttgcctcacctaa

SEQ ID NO: 285127 - DNA, 25 bp, probe
tcaatcaacactttttcagactaaa

SEQ ID NO: 285128 - DNA, 25 bp, probe
tcaaaaagtggatagaacgcaaaca

SEQ ID NO: 285129 - DNA, 25 bp, probe
tcacagcaaattcatcaaaaccatc

SEQ ID NO: 285130 - DNA, 25 bp, probe
tcaagtacatctcacagctgggcaa

SEQ ID NO: 285131 - DNA, 25 bp, probe
tcaagtacctgcccgaggtgtttgc

SEQ ID NO: 285132 - DNA, 25 bp, probe
tcaagcttcgcagccagggcgactt

SEQ ID NO: 285133 - DNA, 25 bp, probe
tcaagttcatgagcctggaaagaat

SEQ ID NO: 285134 - DNA, 25 bp, probe
tcaatgattagatcgggtctcggaa

SEQ ID NO: 285135 - DNA, 25 bp, probe
tcaaatgataactggaagctgagga

SEQ ID NO: 285136 - DNA, 25 bp, probe
tcaacactgaactgcaactgtggca

SEQ ID NO: 285137 - DNA, 25 bp, probe
tcaacactgaactgcaactgtggca

SEQ ID NO: 285138 - DNA, 25 bp, probe
tcaacactgggctgatcctgaatgg

SEQ ID NO: 285139 - DNA, 25 bp, probe
tcaagacggtcaccatcgtgctagg

SEQ ID NO: 285140 - DNA, 25 bp, probe
tcaatgaggtcataatccttagtga

SEQ ID NO: 285141 - DNA, 25 bp, probe
tcaaaggcctcctatccaaagctac

SEQ ID NO: 285142 - DNA, 25 bp, probe
tcacatgaagttacaaacatacagc

SEQ ID NO: 285143 - DNA, 25 bp, probe
tcacaccacctgaccaagatgacag

SEQ ID NO: 285144 - DNA, 25 bp, probe
tcaacaaccgcaacatggatggagg

SEQ ID NO: 285145 - DNA, 25 bp, probe
tcaacaaacagaacttgatcctgcg

SEQ ID NO: 285146 - DNA, 25 bp, probe
tcaagccccagaacctgctggtgga

SEQ ID NO: 285147 - DNA, 25 bp, probe
tcaagtcagaggttccattggtgga

SEQ ID NO: 285148 - DNA, 25 bp, probe
tcaagtcagaggttccattggtgga

SEQ ID NO: 285149 - DNA, 25 bp, probe
tcaaggccgggtgattgactgcagt

SEQ ID NO: 285150 - DNA, 25 bp, probe
tacggggccagtcatgtgaagcgtt

SEQ ID NO: 285151 - DNA, 25 bp, probe
taagtcaggctggggttgaagtttg

SEQ ID NO: 285152 - DNA, 25 bp, probe
taagtcaggctggggttgaagtttg

SEQ ID NO: 285153 - DNA, 25 bp, probe
tcaattcaaggttatctggaagttc

SEQ ID NO: 285154 - DNA, 25 bp, probe
tcaatggcaatcctcatatcttaga

SEQ ID NO: 285155 - DNA, 25 bp, probe
taatgggtcaccttctcttgacctt

SEQ ID NO: 285156 - DNA, 25 bp, probe
taaaactcaacatgcttctaccaag

SEQ ID NO: 285157 - DNA, 25 bp, probe
taaaactcaacatgcttctaccaag

SEQ ID NO: 285158 - DNA, 25 bp, probe
tcaaaacctacaagattcaactgaa

SEQ ID NO: 285159 - DNA, 25 bp, probe
tcaacaacctgctaagtgacacgga

SEQ ID NO: 285160 - DNA, 25 bp, probe
tcaacaacctgctaagtgacacgga

SEQ ID NO: 285161 - DNA, 25 bp, probe
tcaaacacctgtttgcagaccccat

SEQ ID NO: 285162 - DNA, 25 bp, probe
tcaaacacctgtttgcagaccccat

SEQ ID NO: 285163 - DNA, 25 bp, probe
tcaaatgcacctaaagaggcctcca

SEQ ID NO: 285164 - DNA, 25 bp, probe
tcaaatgccactcaagcatgcctcc

SEQ ID NO: 285165 - DNA, 25 bp, probe
tcacagcagctctttcaagcagcct

SEQ ID NO: 285166 - DNA, 25 bp, probe
tcacagcagctctttcaagcagcct

SEQ ID NO: 285167 - DNA, 25 bp, probe
tcacaggcaagttcacagctcacca

SEQ ID NO: 285168 - DNA, 25 bp, probe
tcaaggcattgagaatgtacctgaa

SEQ ID NO: 285169 - DNA, 25 bp, probe
tcaaggccaagtttctacaggaagc

SEQ ID NO: 285170 - DNA, 25 bp, probe
tcaaggtccagccattcttcaggac

SEQ ID NO: 285171 - DNA, 25 bp, probe
tcaaggtccagccattcttcaggac

SEQ ID NO: 285172 - DNA, 25 bp, probe
tcacagagatccagtctattcaagg

SEQ ID NO: 285173 - DNA, 25 bp, probe
tcaacactcagctgctctgttgcca

SEQ ID NO: 285174 - DNA, 25 bp, probe
tcaacagatccgactttggcctctg

SEQ ID NO: 285175 - DNA, 25 bp, probe
tcaacagatccgactttggcctctg

SEQ ID NO: 285176 - DNA, 25 bp, probe
tcaaagtctgttctggcggcattgt

SEQ ID NO: 285177 - DNA, 25 bp, probe
tcaaaattggaggttcgtctggctt

SEQ ID NO: 285178 - DNA, 25 bp, probe
tcaaaatctagaagagtctattgtc

SEQ ID NO: 285179 - DNA, 25 bp, probe
tcaaatatccagagaacttctttct

SEQ ID NO: 285180 - DNA, 25 bp, probe
tcaaaaacaaacgatattcttctcc

SEQ ID NO: 285181 - DNA, 25 bp, probe
tcacaataagtataggattttgcac

SEQ ID NO: 285182 - DNA, 25 bp, probe
tcaaatgctaaatatggtcgttact

SEQ ID NO: 285183 - DNA, 25 bp, probe
tcaagctttacacagctgtccttac

SEQ ID NO: 285184 - DNA, 25 bp, probe
tcacagctgtgttcgccagcatcta

SEQ ID NO: 285185 - DNA, 25 bp, probe
taatgcgttggcccacgtagcaaaa

SEQ ID NO: 285186 - DNA, 25 bp, probe
taaggctgtgggcacacttgctcat

SEQ ID NO: 285187 - DNA, 25 bp, probe
tcacagggtggagatcagattggat

SEQ ID NO: 285188 - DNA, 25 bp, probe
tcacagggctgcaacaaccagtagc

SEQ ID NO: 285189 - DNA, 25 bp, probe
tcacagggactctccatatgtgagc

SEQ ID NO: 285190 - DNA, 25 bp, probe
tcacagggactctccatatgtgagc

SEQ ID NO: 285191 - DNA, 25 bp, probe
tcacagatgggctccagcgtatcac

SEQ ID NO: 285192 - DNA, 25 bp, probe
tcaaatgtagaaacagggacacggg

SEQ ID NO: 285193 - DNA, 25 bp, probe
tcaaacatagacaatcatgggatat

SEQ ID NO: 285194 - DNA, 25 bp, probe
tcaaacatcaacaacagggaccaga

SEQ ID NO: 285195 - DNA, 25 bp, probe
tcaaacatcaacaacagggaccaga

SEQ ID NO: 285196 - DNA, 25 bp, probe
tcactactagacagcacaaatacga

SEQ ID NO: 285197 - DNA, 25 bp, probe
tcactactagacagcacaaatacga

SEQ ID NO: 285198 - DNA, 25 bp, probe
tcactatcatcaagagaaaactcac

SEQ ID NO: 285199 - DNA, 25 bp, probe
tcaatctatcagcaactacctccaa

SEQ ID NO: 285200 - DNA, 25 bp, probe
tcacatctatatccaagttacctcc

SEQ ID NO: 285201 - DNA, 25 bp, probe
tcacaggcaaccagttggcctcatc

SEQ ID NO: 285202 - DNA, 25 bp, probe
tcaagccgcaccagagatggctgcc

SEQ ID NO: 285203 - DNA, 25 bp, probe
tcaagcacgaccacattgtttccac

SEQ ID NO: 285204 - DNA, 25 bp, probe
tcaacggcaaagaatctgttattac

SEQ ID NO: 285205 - DNA, 25 bp, probe
tcaacggaacagacatctccgcttc

SEQ ID NO: 285206 - DNA, 25 bp, probe
taaggtggacgagcatgcccttttt

SEQ ID NO: 285207 - DNA, 25 bp, probe
taatttgtgatccaacatgtacagt

SEQ ID NO: 285208 - DNA, 25 bp, probe
taattgttcatcctaattgttcctg

SEQ ID NO: 285209 - DNA, 25 bp, probe
tcaattttgcatgctcgattattcc

SEQ ID NO: 285210 - DNA, 25 bp, probe
tcaaatctttacctgttagtcccac

SEQ ID NO: 285211 - DNA, 25 bp, probe
tcaaagctgttcaagtttcctacca

SEQ ID NO: 285212 - DNA, 25 bp, probe
tcaaggattaattcttcctctacca

SEQ ID NO: 285213 - DNA, 25 bp, probe
tcaaagctaaattccacactaccac

SEQ ID NO: 285214 - DNA, 25 bp, probe
tcaaagctaaattccacactaccac

SEQ ID NO: 285215 - DNA, 25 bp, probe
ttaacttaatatggacttacagtca

SEQ ID NO: 285216 - DNA, 25 bp, probe
ttaacttaatatggacttacagtca

SEQ ID NO: 285217 - DNA, 25 bp, probe
taatactgtaacatactttttaaat

SEQ ID NO: 285218 - DNA, 25 bp, probe
tcaacagtgtaactaaatttctcta

SEQ ID NO: 285219 - DNA, 25 bp, probe
tcaacagttgggtgcactacttcta

SEQ ID NO: 285220 - DNA, 25 bp, probe
tcaaagtttggtttcgatcttcata

SEQ ID NO: 285221 - DNA, 25 bp, probe
tcaaacttcatgcggtggtcaccaa

SEQ ID NO: 285222 - DNA, 25 bp, probe
tcaaagccaagctggggatgccgca

SEQ ID NO: 285223 - DNA, 25 bp, probe
tcaacagcaccgtggtgggcctgac

SEQ ID NO: 285224 - DNA, 25 bp, probe
tcaacagccctgtgaagtgacctca

SEQ ID NO: 285225 - DNA, 25 bp, probe
tcaatgactccgtggagctgagcca

SEQ ID NO: 285226 - DNA, 25 bp, probe
tcaaacacacagacagaggaggcca

SEQ ID NO: 285227 - DNA, 25 bp, probe
tcaacagagccagaagtagccgccc

SEQ ID NO: 285228 - DNA, 25 bp, probe
tcaaagaccacaaggccaccagttc

SEQ ID NO: 285229 - DNA, 25 bp, probe
tcacagcgacccaggatgctgacag

SEQ ID NO: 285230 - DNA, 25 bp, probe
tcaaggattcctgggtgctcaagtt

SEQ ID NO: 285231 - DNA, 25 bp, probe
taagacttcacagggttcacatggt

SEQ ID NO: 285232 - DNA, 25 bp, probe
tcaaggcgaacaccgtcttcgagat

SEQ ID NO: 285233 - DNA, 25 bp, probe
tcaaggttaagtctttcgagaagga

SEQ ID NO: 285234 - DNA, 25 bp, probe
tcaaggaccaagagcaattgcagca

SEQ ID NO: 285235 - DNA, 25 bp, probe
taagaactgaatgtgcaacttgcaa

SEQ ID NO: 285236 - DNA, 25 bp, probe
tcaagaccataaactggactctgct

SEQ ID NO: 285237 - DNA, 25 bp, probe
tcaagacccagcgagctgccattgg

SEQ ID NO: 285238 - DNA, 25 bp, probe
tcacagaaccaggcgccctgaggat

SEQ ID NO: 285239 - DNA, 25 bp, probe
tcaacaaggagggccatgtgaagat

SEQ ID NO: 285240 - DNA, 25 bp, probe
tcacacggcagacgccggtggacag

SEQ ID NO: 285241 - DNA, 25 bp, probe
tcaagcgtcagaccgagtgcatggt

SEQ ID NO: 285242 - DNA, 25 bp, probe
tcaagcgtcagaccgagtgcatggt

SEQ ID NO: 285243 - DNA, 25 bp, probe
tcaagcagcgcatcacagttctgga

SEQ ID NO: 285244 - DNA, 25 bp, probe
tcaagcagcgcatcacagttctgga

SEQ ID NO: 285245 - DNA, 25 bp, probe
tcaacatggatggcactgccctcta

SEQ ID NO: 285246 - DNA, 25 bp, probe
tcaacatggatggcactgccctcta

SEQ ID NO: 285247 - DNA, 25 bp, probe
tcacatgaagagcctctgcagccct

SEQ ID NO: 285248 - DNA, 25 bp, probe
tcacatgaagagcctctgcagccct

SEQ ID NO: 285249 - DNA, 25 bp, probe
tcacagaggagcatgccacgctgca

SEQ ID NO: 285250 - DNA, 25 bp, probe
tcacatactgagacctccagatgca

SEQ ID NO: 285251 - DNA, 25 bp, probe
tcacatatcaagtcccgaggcagca

SEQ ID NO: 285252 - DNA, 25 bp, probe
taatatgcaagactctcaaggagta

SEQ ID NO: 285253 - DNA, 25 bp, probe
tcacaagtcaagttgcacaggcagt

SEQ ID NO: 285254 - DNA, 25 bp, probe
tcaaagtcattgcccacggcaaaga

SEQ ID NO: 285255 - DNA, 25 bp, probe
tcaaatgagcttgccacaagcaaga

SEQ ID NO: 285256 - DNA, 25 bp, probe
tcaaatgagcttgccacaagcaaga

SEQ ID NO: 285257 - DNA, 25 bp, probe
tcaaagactgtggagacacaggtga

SEQ ID NO: 285258 - DNA, 25 bp, probe
tcacagggcctggaaacaagtccta

SEQ ID NO: 285259 - DNA, 25 bp, probe
tcacaagacctttcaaccagtccta

SEQ ID NO: 285260 - DNA, 25 bp, probe
tcaaagacaacaactacctgcccta

SEQ ID NO: 285261 - DNA, 25 bp, probe
tcaaagacattcactatgtttttat

SEQ ID NO: 285262 - DNA, 25 bp, probe
tcaacgagatgatggtttttgtctt

SEQ ID NO: 285263 - DNA, 25 bp, probe
tcaacgagatgatggtttttgtctt

SEQ ID NO: 285264 - DNA, 25 bp, probe
tcaaaagtgattatctctttgatct

SEQ ID NO: 285265 - DNA, 25 bp, probe
tcaaaagtgattatctctttgatct

SEQ ID NO: 285266 - DNA, 25 bp, probe
tcaatatcagttttcctatcgtgcc

SEQ ID NO: 285267 - DNA, 25 bp, probe
tcaaagcagatgtcttcagctatgc

SEQ ID NO: 285268 - DNA, 25 bp, probe
tcaatggagaggtgcgctcagccgt

SEQ ID NO: 285269 - DNA, 25 bp, probe
tcacagggaggagcgccatcctgtc

SEQ ID NO: 285270 - DNA, 25 bp, probe
tcaaaaagaaccggcatcctgactt

SEQ ID NO: 285271 - DNA, 25 bp, probe
taaaaagcaacccccatgtatgcct

SEQ ID NO: 285272 - DNA, 25 bp, probe
tcacaaaaacactgctctgcattgg

SEQ ID NO: 285273 - DNA, 25 bp, probe
taagaaaccacttttccatggggat

SEQ ID NO: 285274 - DNA, 25 bp, probe
tacagttacccgtttcaatgttatt

SEQ ID NO: 285275 - DNA, 25 bp, probe
taatgttaacacaatttaagtcata

SEQ ID NO: 285276 - DNA, 25 bp, probe
taagattacacagattatacagctc

SEQ ID NO: 285277 - DNA, 25 bp, probe
tcaataaacattgagtgagcacctc

SEQ ID NO: 285278 - DNA, 25 bp, probe
tcaaaaaccccagtgaatacccgca

SEQ ID NO: 285279 - DNA, 25 bp, probe
tcaaaaacgcccggatctcagtcaa

SEQ ID NO: 285280 - DNA, 25 bp, probe
tcaaaaacgcccggatctcagtcaa

SEQ ID NO: 285281 - DNA, 25 bp, probe
tcacaataaacggctgcgtctcctc

SEQ ID NO: 285282 - DNA, 25 bp, probe
tcaacattgagagctgggtctgcct

SEQ ID NO: 285283 - DNA, 25 bp, probe
tcaacattgagagctgggtctgcct

SEQ ID NO: 285284 - DNA, 25 bp, probe
tcaaatacatgaactctggtggtct

SEQ ID NO: 285285 - DNA, 25 bp, probe
tcaaatggctgacttctggttctcc

SEQ ID NO: 285286 - DNA, 25 bp, probe
tcaaatggctgacttctggttctcc

SEQ ID NO: 285287 - DNA, 25 bp, probe
tcacactgagtgtctcatcttggta

SEQ ID NO: 285288 - DNA, 25 bp, probe
tcacaaggtgctggcacttattgca

SEQ ID NO: 285289 - DNA, 25 bp, probe
tcacacagagtcagcactggggagg

SEQ ID NO: 285290 - DNA, 25 bp, probe
tcacaattgtcacccaggctggagt

SEQ ID NO: 285291 - DNA, 25 bp, probe
tcacaattgtcacccaggctggagt

SEQ ID NO: 285292 - DNA, 25 bp, probe
tcaacattgtcatcaccgagggctg

SEQ ID NO: 285293 - DNA, 25 bp, probe
tcaaattcttcctggagaggtgatg

SEQ ID NO: 285294 - DNA, 25 bp, probe
tcaagctcctttaggactgggtgga

SEQ ID NO: 285295 - DNA, 25 bp, probe
tcaacacgcacctgggcattggtga

SEQ ID NO: 285296 - DNA, 25 bp, probe
tcacactcgcccagttgtgtgtgtg

SEQ ID NO: 285297 - DNA, 25 bp, probe
tcaactgctgcctggatgttttctg

SEQ ID NO: 285298 - DNA, 25 bp, probe
tcaactgctgcctggatgttttctg

SEQ ID NO: 285299 - DNA, 25 bp, probe
tcacactctctgtggtatgcatttt

SEQ ID NO: 285300 - DNA, 25 bp, probe
tcacagtcacaatgtattgcataat

SEQ ID NO: 285301 - DNA, 25 bp, probe
tcacaatcaagatctgtatcaagat

SEQ ID NO: 285302 - DNA, 25 bp, probe
tcacattcacacgcgattgcgcaat

SEQ ID NO: 285303 - DNA, 25 bp, probe
tcacattcacacgcgattgcgcaat

SEQ ID NO: 285304 - DNA, 25 bp, probe
tcacatcacccatcagcacatggaa

SEQ ID NO: 285305 - DNA, 25 bp, probe
tcaacatccacactaggcaggaata

SEQ ID NO: 285306 - DNA, 25 bp, probe
tcaaatcctgctttggcgacaaaaa

SEQ ID NO: 285307 - DNA, 25 bp, probe
tcaaatccagctttggcaataaaaa

SEQ ID NO: 285308 - DNA, 25 bp, probe
tcaacacccttatgattcacacaga

SEQ ID NO: 285309 - DNA, 25 bp, probe
tcaacacccttatgattcacacaga

SEQ ID NO: 285310 - DNA, 25 bp, probe
tcaaacgttctttatccagacagac

SEQ ID NO: 285311 - DNA, 25 bp, probe
tcaaactgggccagtgggccagcac

SEQ ID NO: 285312 - DNA, 25 bp, probe
tcaaagaagtacagagcggcggcct

SEQ ID NO: 285313 - DNA, 25 bp, probe
taaagaactcagaggttggccccta

SEQ ID NO: 285314 - DNA, 25 bp, probe
taaaggactcaaacgcgtggaaaat

SEQ ID NO: 285315 - DNA, 25 bp, probe
taatcggcggaaaccggctgaaaca

SEQ ID NO: 285316 - DNA, 25 bp, probe
taatcggcggaaaccggctgaaaca

SEQ ID NO: 285317 - DNA, 25 bp, probe
tcacacggaggattaccggctgcga

SEQ ID NO: 285318 - DNA, 25 bp, probe
tcacagctgaaatctcagggcactc

SEQ ID NO: 285319 - DNA, 25 bp, probe
tcacagtgaaatttcattcatgttc

SEQ ID NO: 285320 - DNA, 25 bp, probe
tcacactcagtgtttgcactctgtt

SEQ ID NO: 285321 - DNA, 25 bp, probe
tcaagtgtgcagtttgacctttgac

SEQ ID NO: 285322 - DNA, 25 bp, probe
tcaatgtctggtatgatccttctga

SEQ ID NO: 285323 - DNA, 25 bp, probe
tcaatgtctggtatgatccttctga

SEQ ID NO: 285324 - DNA, 25 bp, probe
taagtcatggtacgtttcctaaaga

SEQ ID NO: 285325 - DNA, 25 bp, probe
taatttcctattcttccaaatgaga

SEQ ID NO: 285326 - DNA, 25 bp, probe
tcaatttcatctacgcgcttcatag

SEQ ID NO: 285327 - DNA, 25 bp, probe
tcaatttacgactgcctatcgggat

SEQ ID NO: 285328 - DNA, 25 bp, probe
tcaatttacgactgcctatcgggat

SEQ ID NO: 285329 - DNA, 25 bp, probe
tcaatttcctggtgtgcttcggacc

SEQ ID NO: 285330 - DNA, 25 bp, probe
tcaatgttcctaatgggttcgtttc

SEQ ID NO: 285331 - DNA, 25 bp, probe
taattatttaagcgtctctgtttac

SEQ ID NO: 285332 - DNA, 25 bp, probe
taagtcttctggaggttctatttac

SEQ ID NO: 285333 - DNA, 25 bp, probe
taattcattttgatggcttctattt

SEQ ID NO: 285334 - DNA, 25 bp, probe
tcacactcacacagttgactatctg

SEQ ID NO: 285335 - DNA, 25 bp, probe
tcacactcacacagttgactatctg

SEQ ID NO: 285336 - DNA, 25 bp, probe
tcaacaccgtggatgatttctggca

SEQ ID NO: 285337 - DNA, 25 bp, probe
tcaataccgtgggttcttcttcgtc

SEQ ID NO: 285338 - DNA, 25 bp, probe
tcaaatcctgtgcccttatttgctg

SEQ ID NO: 285339 - DNA, 25 bp, probe
tcaaaccttcgcgtggcattttcac

SEQ ID NO: 285340 - DNA, 25 bp, probe
tcaattcactggccgtcgttttaca

SEQ ID NO: 285341 - DNA, 25 bp, probe
tcaactacggggatgttccacacaa

SEQ ID NO: 285342 - DNA, 25 bp, probe
tcaaaccggaggagagactcaccat

SEQ ID NO: 285343 - DNA, 25 bp, probe
tcaaggacgatgagtacaacccctg

SEQ ID NO: 285344 - DNA, 25 bp, probe
taagatcctgtgtgtaaccccaagc

SEQ ID NO: 285345 - DNA, 25 bp, probe
tacagcttcgtgtggttccactacc

SEQ ID NO: 285346 - DNA, 25 bp, probe
tacaatggctgtttggttccagcca

SEQ ID NO: 285347 - DNA, 25 bp, probe
tcacaatgggctcgggtacccagca

SEQ ID NO: 285348 - DNA, 25 bp, probe
tacaatcaggggttgtacctccata

SEQ ID NO: 285349 - DNA, 25 bp, probe
taattatggggtggaagctctcaaa

SEQ ID NO: 285350 - DNA, 25 bp, probe
tactactgagggaaatagccaaaaa

SEQ ID NO: 285351 - DNA, 25 bp, probe
taatacagagtacgttaaaagcaaa

SEQ ID NO: 285352 - DNA, 25 bp, probe
tcaaacagttggattcagaaccaag

SEQ ID NO: 285353 - DNA, 25 bp, probe
tcaacaaggtatacctcagttccac

SEQ ID NO: 285354 - DNA, 25 bp, probe
tcaaaaatgtcttcccagtttctcc

SEQ ID NO: 285355 - DNA, 25 bp, probe
tcaaaacatgtttcctagtattaag

SEQ ID NO: 285356 - DNA, 25 bp, probe
tcaaaacatgtttcctagtattaag

SEQ ID NO: 285357 - DNA, 25 bp, probe
tcacaaacatttgctcttaagttac

SEQ ID NO: 285358 - DNA, 25 bp, probe
tcacaaacacttggctcctagagac

SEQ ID NO: 285359 - DNA, 25 bp, probe
tcaacaacagcggcctggccagtga

SEQ ID NO: 285360 - DNA, 25 bp, probe
tcaagctgaagctcctggactggat

SEQ ID NO: 285361 - DNA, 25 bp, probe
tcaagcagttcatggcgagagggat

SEQ ID NO: 285362 - DNA, 25 bp, probe
tcacacgtggggtcagcagaggtac

SEQ ID NO: 285363 - DNA, 25 bp, probe
tcaagcagtcggcctacgacttcaa

SEQ ID NO: 285364 - DNA, 25 bp, probe
tcaaagctctgggatagcccttcca

SEQ ID NO: 285365 - DNA, 25 bp, probe
tcaagagatcgagaccatcctggcc

SEQ ID NO: 285366 - DNA, 25 bp, probe
tcacagtgcctgtgcaccattcgag

SEQ ID NO: 285367 - DNA, 25 bp, probe
tcacagaccgtcaagtatgctccag

SEQ ID NO: 285368 - DNA, 25 bp, probe
taaaattattacaggagctaagtca

SEQ ID NO: 285369 - DNA, 25 bp, probe
taaaattttttttggttgagtcatg

SEQ ID NO: 285370 - DNA, 25 bp, probe
taagtcctatttttcacctaagtca

SEQ ID NO: 285371 - DNA, 25 bp, probe
taaagtcttttgctccgctgacatt

SEQ ID NO: 285372 - DNA, 25 bp, probe
tcaagagatttgtgactttgtcaat

SEQ ID NO: 285373 - DNA, 25 bp, probe
tcaagattactataatggctgttat

SEQ ID NO: 285374 - DNA, 25 bp, probe
tcaagattactataatggctgttat

SEQ ID NO: 285375 - DNA, 25 bp, probe
tcaaataattgaactacctgctaat

SEQ ID NO: 285376 - DNA, 25 bp, probe
tcacagcagacaatggacctcctta

SEQ ID NO: 285377 - DNA, 25 bp, probe
taatctgacttggacagctcctggg

SEQ ID NO: 285378 - DNA, 25 bp, probe
tcaatgctgtctggagtccttctgg

SEQ ID NO: 285379 - DNA, 25 bp, probe
tcaaggcatctggagggctttcgtg

SEQ ID NO: 285380 - DNA, 25 bp, probe
tcaaggcatctggagggctttcgtg

SEQ ID NO: 285381 - DNA, 25 bp, probe
tcacagcgctctgacatactttcat

SEQ ID NO: 285382 - DNA, 25 bp, probe
tcacagcagcttcgtgcttttgtac

SEQ ID NO: 285383 - DNA, 25 bp, probe
tcacagcagattaccatttattaca

SEQ ID NO: 285384 - DNA, 25 bp, probe
tcaagctcatttcctggtatgacaa

SEQ ID NO: 285385 - DNA, 25 bp, probe
tcaactctaccttagtagatacaag

SEQ ID NO: 285386 - DNA, 25 bp, probe
tcaactctacacaaatccagctaac

SEQ ID NO: 285387 - DNA, 25 bp, probe
taatgctaccattgagatccctaat

SEQ ID NO: 285388 - DNA, 25 bp, probe
tcaatcatccacagagacctcaaga

SEQ ID NO: 285389 - DNA, 25 bp, probe
tcaatactcgcaagtgccccgaaaa

SEQ ID NO: 285390 - DNA, 25 bp, probe
tcaaaatagcaggtgctccccagct

SEQ ID NO: 285391 - DNA, 25 bp, probe
tcaaaatagcaggtgctccccagct

SEQ ID NO: 285392 - DNA, 25 bp, probe
tcaaagatatgtcttcctccagaga

SEQ ID NO: 285393 - DNA, 25 bp, probe
tcacaagttgccatctaccttggga

SEQ ID NO: 285394 - DNA, 25 bp, probe
tcacaagctaccatctcagatatat

SEQ ID NO: 285395 - DNA, 25 bp, probe
tcaaagcacaactctatttcatgct

SEQ ID NO: 285396 - DNA, 25 bp, probe
tcacactacctctctgattttgttt

SEQ ID NO: 285397 - DNA, 25 bp, probe
tcaaatgggctctctcattcttgga

SEQ ID NO: 285398 - DNA, 25 bp, probe
tcaaatgggctctctcattcttgga

SEQ ID NO: 285399 - DNA, 25 bp, probe
taagggactgtgccagatgttagga

SEQ ID NO: 285400 - DNA, 25 bp, probe
tcaatgtgggcaaggcatatgtgta

SEQ ID NO: 285401 - DNA, 25 bp, probe
tcaatgtgggcaaggcatatgtgta

SEQ ID NO: 285402 - DNA, 25 bp, probe
tcacacttggcaagcgcatggtcct

SEQ ID NO: 285403 - DNA, 25 bp, probe
tcaacatgtggaaagcttgtcttag

SEQ ID NO: 285404 - DNA, 25 bp, probe
tcaaatgggactcttgtgctgctca

SEQ ID NO: 285405 - DNA, 25 bp, probe
tcaaagggagcggccaggtgtttac

SEQ ID NO: 285406 - DNA, 25 bp, probe
tcaaagggagcggccaggtgtttac

SEQ ID NO: 285407 - DNA, 25 bp, probe
tcaaaggtcacgtgcggttcattga

SEQ ID NO: 285408 - DNA, 25 bp, probe
tcaaaagctcacatctcaggtttcc

SEQ ID NO: 285409 - DNA, 25 bp, probe
tcaaaagctcacatctcaggtttcc

SEQ ID NO: 285410 - DNA, 25 bp, probe
tcaacaactcagcaccgtgacttct

SEQ ID NO: 285411 - DNA, 25 bp, probe
tcaaaatcgatttcctgtacttcta

SEQ ID NO: 285412 - DNA, 25 bp, probe
tcaaaatcgatttcctgtacttcta

SEQ ID NO: 285413 - DNA, 25 bp, probe
tcaaatatcgctttacatgttcttg

SEQ ID NO: 285414 - DNA, 25 bp, probe
tcaacagactcttctacattttatt

SEQ ID NO: 285415 - DNA, 25 bp, probe
tcaaagactcattgcttaattctaa

SEQ ID NO: 285416 - DNA, 25 bp, probe
tcaaccactgcaactgtaattctag

SEQ ID NO: 285417 - DNA, 25 bp, probe
tcaactgagtaagtctgaacctcta

SEQ ID NO: 285418 - DNA, 25 bp, probe
tcaactgagtaagtctgaacctcta

SEQ ID NO: 285419 - DNA, 25 bp, probe
tcaactgagtaagtctgaacctcta

SEQ ID NO: 285420 - DNA, 25 bp, probe
tcaaatgaataatgctacacacctt

SEQ ID NO: 285421 - DNA, 25 bp, probe
tcaatagttcaaggctaccctccac

SEQ ID NO: 285422 - DNA, 25 bp, probe
taatagtgccaaggaagccttctga

SEQ ID NO: 285423 - DNA, 25 bp, probe
tcaactgtacaatgaactattctca

SEQ ID NO: 285424 - DNA, 25 bp, probe
tcaagttacaaatcactgtgtccat

SEQ ID NO: 285425 - DNA, 25 bp, probe
tcaagttacaaatcactgtgtccat

SEQ ID NO: 285426 - DNA, 25 bp, probe
tcaagtttccaacgcagtgtctcaa

SEQ ID NO: 285427 - DNA, 25 bp, probe
taagttaccaacttgcatttaacaa

SEQ ID NO: 285428 - DNA, 25 bp, probe
taattttcccaatgatcttgcaaaa

SEQ ID NO: 285429 - DNA, 25 bp, probe
taattcttcacctaagtctctgtga

SEQ ID NO: 285430 - DNA, 25 bp, probe
tcaaccccaccatatgaattgtaca

SEQ ID NO: 285431 - DNA, 25 bp, probe
tcaactgctcccgtggaagattaaa

SEQ ID NO: 285432 - DNA, 25 bp, probe
taaggacgcatggggaaaatggaca

SEQ ID NO: 285433 - DNA, 25 bp, probe
taaggacgacagaacaacaaggaga

SEQ ID NO: 285434 - DNA, 25 bp, probe
tagaggacaagacaataaagggatg

SEQ ID NO: 285435 - DNA, 25 bp, probe
taatgaccaacgggaaaaagccagt

SEQ ID NO: 285436 - DNA, 25 bp, probe
taatatcacaacccagaagtaacca

SEQ ID NO: 285437 - DNA, 25 bp, probe
tcaaccacacaacaacagttaacac

SEQ ID NO: 285438 - DNA, 25 bp, probe
tcaaccagaagggatacagtgtgaa

SEQ ID NO: 285439 - DNA, 25 bp, probe
tcaacccagaggctactcttgactt

SEQ ID NO: 285440 - DNA, 25 bp, probe
tcaaccacaggtttcgctctgggtt

SEQ ID NO: 285441 - DNA, 25 bp, probe
tcaaccacaggtttgtctgctaccc

SEQ ID NO: 285442 - DNA, 25 bp, probe
tcaaccaggccttaggtgctacagc

SEQ ID NO: 285443 - DNA, 25 bp, probe
tcaacacaggccgctaggaagcagc

SEQ ID NO: 285444 - DNA, 25 bp, probe
tcaacactgggccttaggagacccc

SEQ ID NO: 285445 - DNA, 25 bp, probe
tcacaacctgaacctaggagtgccc

SEQ ID NO: 285446 - DNA, 25 bp, probe
tcacaagactggcttcaggcatagc

SEQ ID NO: 285447 - DNA, 25 bp, probe
tcacaatgttggcctgtcagagctt

SEQ ID NO: 285448 - DNA, 25 bp, probe
tcaacattgggccagtaggcatctt

SEQ ID NO: 285449 - DNA, 25 bp, probe
tcaaatgcattgccaaggaggccct

SEQ ID NO: 285450 - DNA, 25 bp, probe
tcaaaattgagctctaggcccaaaa

SEQ ID NO: 285451 - DNA, 25 bp, probe
tcaagaaccagctgctaggccctga

SEQ ID NO: 285452 - DNA, 25 bp, probe
tcaagaatggggcctggggctctca

SEQ ID NO: 285453 - DNA, 25 bp, probe
tcaagattaaggccctgaggctcca

SEQ ID NO: 285454 - DNA, 25 bp, probe
tcaaagaaagcgccgctcatgacta

SEQ ID NO: 285455 - DNA, 25 bp, probe
tcaaatgcaaatgagccatatgaaa

SEQ ID NO: 285456 - DNA, 25 bp, probe
tcaagagataatgtacaatgtcaga

SEQ ID NO: 285457 - DNA, 25 bp, probe
tcaagagaaagttaccattcagagg

SEQ ID NO: 285458 - DNA, 25 bp, probe
tcaatggggctgataccttcacagc

SEQ ID NO: 285459 - DNA, 25 bp, probe
tcaacaggcaaggtaatcttcacac

SEQ ID NO: 285460 - DNA, 25 bp, probe
tcaacatggccggttatgcacatca

SEQ ID NO: 285461 - DNA, 25 bp, probe
tcaaaatgcgccccatatcactgca

SEQ ID NO: 285462 - DNA, 25 bp, probe
tcaaaatccatccgcaagactcaca

SEQ ID NO: 285463 - DNA, 25 bp, probe
tcaataaccagggaagagccaacaa

SEQ ID NO: 285464 - DNA, 25 bp, probe
tcaaagatgccagagacgcggaaca

SEQ ID NO: 285465 - DNA, 25 bp, probe
tcaagcaatggagagcggcgagcat

SEQ ID NO: 285466 - DNA, 25 bp, probe
tcaagacggagaagaggctgtgcaa

SEQ ID NO: 285467 - DNA, 25 bp, probe
tcaagacggagaagaggctgtgcaa

SEQ ID NO: 285468 - DNA, 25 bp, probe
tcaagaagggggaatgctgtcggga

SEQ ID NO: 285469 - DNA, 25 bp, probe
tcaaagaggtggacgagtgctctcg

SEQ ID NO: 285470 - DNA, 25 bp, probe
tcaaagtggtgaccaagctggtgaa

SEQ ID NO: 285471 - DNA, 25 bp, probe
tcaaagtgctggtcgaggcaggcgc

SEQ ID NO: 285472 - DNA, 25 bp, probe
tcaaggcgctgttggaggctgggtg

SEQ ID NO: 285473 - DNA, 25 bp, probe
tcaagggatgaagacctgcagtgag

SEQ ID NO: 285474 - DNA, 25 bp, probe
tcaagaggaacatatgcctgagaac

SEQ ID NO: 285475 - DNA, 25 bp, probe
tcaaaggacatatggccaatgtgca

SEQ ID NO: 285476 - DNA, 25 bp, probe
tcaagaaatcttggagccgctggac

SEQ ID NO: 285477 - DNA, 25 bp, probe
tcaagaggaagtgagcggtgctgtc

SEQ ID NO: 285478 - DNA, 25 bp, probe
taagggaataggccaggctccatcc

SEQ ID NO: 285479 - DNA, 25 bp, probe
tcaaagacaaacctctgagctccat

SEQ ID NO: 285480 - DNA, 25 bp, probe
tcaaatgacagattccagttcccat

SEQ ID NO: 285481 - DNA, 25 bp, probe
taattacaaaaagatcagccattta

SEQ ID NO: 285482 - DNA, 25 bp, probe
taattacaaaaagatcagccattta

SEQ ID NO: 285483 - DNA, 25 bp, probe
tcaactactttctctacagcttttc

SEQ ID NO: 285484 - DNA, 25 bp, probe
taaccccgtcatttacgcatacttc

SEQ ID NO: 285485 - DNA, 25 bp, probe
taaccccaatatttcaggtgcctcc

SEQ ID NO: 285486 - DNA, 25 bp, probe
taattaccagtatatcagaggaaaa

SEQ ID NO: 285487 - DNA, 25 bp, probe
taataacaaggacaatgggataact

SEQ ID NO: 285488 - DNA, 25 bp, probe
taaacattcaggtcttttggtaagc

SEQ ID NO: 285489 - DNA, 25 bp, probe
tacgaattcaagctgtttaataaca

SEQ ID NO: 285490 - DNA, 25 bp, probe
tacgaattcaagctgtttaataaca

SEQ ID NO: 285491 - DNA, 25 bp, probe
tacccttcaatgttaaatctacaaa

SEQ ID NO: 285492 - DNA, 25 bp, probe
tacccttcaatgttaaatctacaaa

SEQ ID NO: 285493 - DNA, 25 bp, probe
ttccccagcaattaaaacggactca

SEQ ID NO: 285494 - DNA, 25 bp, probe
ttccccagcaattaaaacggactca

SEQ ID NO: 285495 - DNA, 25 bp, probe
taaccggtaatggaaaaggactcat

SEQ ID NO: 285496 - DNA, 25 bp, probe
taacctggtttcgttagaggtgtct

SEQ ID NO: 285497 - DNA, 25 bp, probe
tcaacctgttttgttggactcctaa

SEQ ID NO: 285498 - DNA, 25 bp, probe
tcaatcctgttatgggtgtatgacc

SEQ ID NO: 285499 - DNA, 25 bp, probe
taatcaggcttatccgatgtgctac

SEQ ID NO: 285500 - DNA, 25 bp, probe
taatcaggcttatccgatgtgctac

SEQ ID NO: 285501 - DNA, 25 bp, probe
taatcaagatgattaccaactggtt

SEQ ID NO: 285502 - DNA, 25 bp, probe
tcaagcaagatatctccagcctgcg

SEQ ID NO: 285503 - DNA, 25 bp, probe
tcaataagatatgtgccctcatcat

SEQ ID NO: 285504 - DNA, 25 bp, probe
tcaattacatgttgcttccagacat

SEQ ID NO: 285505 - DNA, 25 bp, probe
tcaactacatggtttacatgttcca

SEQ ID NO: 285506 - DNA, 25 bp, probe
tcaagctcacagactacggcatgtg

SEQ ID NO: 285507 - DNA, 25 bp, probe
tcaagcatggcaccttgggcagtgg

SEQ ID NO: 285508 - DNA, 25 bp, probe
tcaagatggctttcgacagagatgg

SEQ ID NO: 285509 - DNA, 25 bp, probe
tcaagagccgtgcctacagtgtgga

SEQ ID NO: 285510 - DNA, 25 bp, probe
taattcgccctcagcatgtgggaag

SEQ ID NO: 285511 - DNA, 25 bp, probe
taattgcttccaaacagctgggttt

SEQ ID NO: 285512 - DNA, 25 bp, probe
tcaatgctgtgtccatccatcaggt

SEQ ID NO: 285513 - DNA, 25 bp, probe
tcaagcagtgtgaccgctactggcc

SEQ ID NO: 285514 - DNA, 25 bp, probe
tcaacaggtgaccttacaggctccc

SEQ ID NO: 285515 - DNA, 25 bp, probe
tcaacgaggggcgtaacatttcctt

SEQ ID NO: 285516 - DNA, 25 bp, probe
tcaacacgtgggttaacatgttttt

SEQ ID NO: 285517 - DNA, 25 bp, probe
tcaagacgctggctgatgtactggt

SEQ ID NO: 285518 - DNA, 25 bp, probe
tcaacagcggctctgaggtctggta

SEQ ID NO: 285519 - DNA, 25 bp, probe
tcaacagcggctctgaggtctggta

SEQ ID NO: 285520 - DNA, 25 bp, probe
taacgggtttttccatggcatcagt

SEQ ID NO: 285521 - DNA, 25 bp, probe
tagaggtggttctgtaataaagtac

SEQ ID NO: 285522 - DNA, 25 bp, probe
tagaggtggttctgtaataaagtac

SEQ ID NO: 285523 - DNA, 25 bp, probe
tagatcgggtctcggaagggaagta

SEQ ID NO: 285524 - DNA, 25 bp, probe
tcaagagggagggggagggcaagta

SEQ ID NO: 285525 - DNA, 25 bp, probe
tcaacaggagggcggaagtagagtc

SEQ ID NO: 285526 - DNA, 25 bp, probe
tcaagcagctggtggaggacctgga

SEQ ID NO: 285527 - DNA, 25 bp, probe
tcaaggctgagaacgggaagcttgt

SEQ ID NO: 285528 - DNA, 25 bp, probe
tcaagactgatactactggggcttt

SEQ ID NO: 285529 - DNA, 25 bp, probe
tcaaggctgacagccctgcgggtta

SEQ ID NO: 285530 - DNA, 25 bp, probe
tcaagtggacagcgcctgaggcggc

SEQ ID NO: 285531 - DNA, 25 bp, probe
tcaagtggacagcgcctgaggcggc

SEQ ID NO: 285532 - DNA, 25 bp, probe
tcaagaagatcagcagctcgggggc

SEQ ID NO: 285533 - DNA, 25 bp, probe
tcaaggagaagcggctccggagcct

SEQ ID NO: 285534 - DNA, 25 bp, probe
tcaaggagaagcggctccggagcct

SEQ ID NO: 285535 - DNA, 25 bp, probe
taattgtcaaggcctccttggctct

SEQ ID NO: 285536 - DNA, 25 bp, probe
tcaaaggtatggcttctctggccct

SEQ ID NO: 285537 - DNA, 25 bp, probe
taacggtcagaagcttcgggtctcg

SEQ ID NO: 285538 - DNA, 25 bp, probe
taatcggttgaccctactgtggatt

SEQ ID NO: 285539 - DNA, 25 bp, probe
tcaaaggtttctcctactttggtga

SEQ ID NO: 285540 - DNA, 25 bp, probe
tcaaagagttttttacacactgttt

SEQ ID NO: 285541 - DNA, 25 bp, probe
taaagaatatttgttccctgactct

SEQ ID NO: 285542 - DNA, 25 bp, probe
taatcagaaattcattttcctgcac

SEQ ID NO: 285543 - DNA, 25 bp, probe
taatcagaaattcattttcctgcac

SEQ ID NO: 285544 - DNA, 25 bp, probe
tcaatcagattgtggcctgttcccc

SEQ ID NO: 285545 - DNA, 25 bp, probe
tcaaggctatgacagtctgctacgc

SEQ ID NO: 285546 - DNA, 25 bp, probe
tcaaggccatgatcctgctcaattc

SEQ ID NO: 285547 - DNA, 25 bp, probe
tcaaggcttcagtctgtccatagtt

SEQ ID NO: 285548 - DNA, 25 bp, probe
tcaaggctgacatcgtgcacgcctt

SEQ ID NO: 285549 - DNA, 25 bp, probe
tcaaagcagacatcgtccatgcctt

SEQ ID NO: 285550 - DNA, 25 bp, probe
tcaaagcccatgtcaatgtctccat

SEQ ID NO: 285551 - DNA, 25 bp, probe
tcaaagcccatgtcaatgtctccat

SEQ ID NO: 285552 - DNA, 25 bp, probe
tcaaagcccatgtcaatgtctccat

SEQ ID NO: 285553 - DNA, 25 bp, probe
tcaaagcccatgtcaatgtctccat

SEQ ID NO: 285554 - DNA, 25 bp, probe
tcaaaggctcatcaagtcccgagga

SEQ ID NO: 285555 - DNA, 25 bp, probe
tcaagaggcagccgaggtcccagtg

SEQ ID NO: 285556 - DNA, 25 bp, probe
tcaaaggcagctaatcctgtccctg

SEQ ID NO: 285557 - DNA, 25 bp, probe
tcaacctggtgattactgtcctggt

SEQ ID NO: 285558 - DNA, 25 bp, probe
tcaaagcgtggaattgctgccctgt

SEQ ID NO: 285559 - DNA, 25 bp, probe
tagatcgcgatgcactactcggtgt

SEQ ID NO: 285560 - DNA, 25 bp, probe
tcaagcactatgagatactcgaggt

SEQ ID NO: 285561 - DNA, 25 bp, probe
tcaacagcagtgccaaacccatcgt

SEQ ID NO: 285562 - DNA, 25 bp, probe
tcaactcagatggatacacccctga

SEQ ID NO: 285563 - DNA, 25 bp, probe
tcaagctcttagacacacccagcaa

SEQ ID NO: 285564 - DNA, 25 bp, probe
tcaagtcactaatcacctgatcata

SEQ ID NO: 285565 - DNA, 25 bp, probe
taatgatcattatcgaagtgtgtat

SEQ ID NO: 285566 - DNA, 25 bp, probe
tcaataccgttccatagaggtttta

SEQ ID NO: 285567 - DNA, 25 bp, probe
tcaacccgtgattccaagtgcttat

SEQ ID NO: 285568 - DNA, 25 bp, probe
tcaacccgtgattccaagtgcttat

SEQ ID NO: 285569 - DNA, 25 bp, probe
tcaatcccgttttgacatgttcact

SEQ ID NO: 285570 - DNA, 25 bp, probe
taatccgtttatgtgatgtgtattc

SEQ ID NO: 285571 - DNA, 25 bp, probe
tacatttttaatatggtttatcaat

SEQ ID NO: 285572 - DNA, 25 bp, probe
taatttattgcaaatttttttctga

SEQ ID NO: 285573 - DNA, 25 bp, probe
taatctgatgtataactttccttta

SEQ ID NO: 285574 - DNA, 25 bp, probe
taactggtggtgaactcactggcct

SEQ ID NO: 285575 - DNA, 25 bp, probe
taattcggggagtctcagccccatc

SEQ ID NO: 285576 - DNA, 25 bp, probe
taacttggggatggtctcccctgcc

SEQ ID NO: 285577 - DNA, 25 bp, probe
taactgaggagaggggcgcctcctc

SEQ ID NO: 285578 - DNA, 25 bp, probe
tcaaaaataacgactctctctcctc

SEQ ID NO: 285579 - DNA, 25 bp, probe
tcaaaacaaaagcatcttccctaga

SEQ ID NO: 285580 - DNA, 25 bp, probe
tcaacttcaaaacatgtttcctagt

SEQ ID NO: 285581 - DNA, 25 bp, probe
tcaacttcaaaacatgtttcctagt

SEQ ID NO: 285582 - DNA, 25 bp, probe
tcaacctagaaacctttatccctgc

SEQ ID NO: 285583 - DNA, 25 bp, probe
tcaacctagaaacctttatccctgc

SEQ ID NO: 285584 - DNA, 25 bp, probe
taataatcataatcctttttcagta

SEQ ID NO: 285585 - DNA, 25 bp, probe
taatagctgtaattccattttggaa

SEQ ID NO: 285586 - DNA, 25 bp, probe
tcaatgactgctgaacaagttttaa

SEQ ID NO: 285587 - DNA, 25 bp, probe
tcaatgactccctcacattcttaga

SEQ ID NO: 285588 - DNA, 25 bp, probe
tcaagtctccgctatgaactccttg

SEQ ID NO: 285589 - DNA, 25 bp, probe
tcaagctttggattgtgcattccta

SEQ ID NO: 285590 - DNA, 25 bp, probe
tcaagctttggattgtgcattccta

SEQ ID NO: 285591 - DNA, 25 bp, probe
tcaagtgtattgctggttctgctgc

SEQ ID NO: 285592 - DNA, 25 bp, probe
tcaagtgtattgctggttctgctgc

SEQ ID NO: 285593 - DNA, 25 bp, probe
tcaatgggcagtgtggctacgtcct

SEQ ID NO: 285594 - DNA, 25 bp, probe
taattgggtgcagtggctcacgcct

SEQ ID NO: 285595 - DNA, 25 bp, probe
tcaattggctgggctactccaactc

SEQ ID NO: 285596 - DNA, 25 bp, probe
taatcgagcacttctcaccaaactt

SEQ ID NO: 285597 - DNA, 25 bp, probe
tactcagcaggtgtgccttaacctc

SEQ ID NO: 285598 - DNA, 25 bp, probe
tagaccaagtttgtccaacctgcag

SEQ ID NO: 285599 - DNA, 25 bp, probe
taacctaatttgagccaactcctga

SEQ ID NO: 285600 - DNA, 25 bp, probe
taccctaagtttatagaatctgcca

SEQ ID NO: 285601 - DNA, 25 bp, probe
taacctgaatttaaaagcacacgaa

SEQ ID NO: 285602 - DNA, 25 bp, probe
taatgggggtgaaaagcccaccatt

SEQ ID NO: 285603 - DNA, 25 bp, probe
taatgggggtgaaaagcccaccatt

SEQ ID NO: 285604 - DNA, 25 bp, probe
taaggaggtgaaatgaatcccaaat

SEQ ID NO: 285605 - DNA, 25 bp, probe
taagtttcataaagaacctcattgt

SEQ ID NO: 285606 - DNA, 25 bp, probe
taagtatttaaaagccagtattcta

SEQ ID NO: 285607 - DNA, 25 bp, probe
taagtttaagaagtgccgtcctcga

SEQ ID NO: 285608 - DNA, 25 bp, probe
taattttgaatttctccttgccacg

SEQ ID NO: 285609 - DNA, 25 bp, probe
taattttggattccttggtggagga

SEQ ID NO: 285610 - DNA, 25 bp, probe
taattttctgggtttgctgtgggga

SEQ ID NO: 285611 - DNA, 25 bp, probe
taattattagtgatgtttgcgggga

SEQ ID NO: 285612 - DNA, 25 bp, probe
taattattaagctgtttgaaggaaa

SEQ ID NO: 285613 - DNA, 25 bp, probe
taattttgtatcttggttgcagtgg

SEQ ID NO: 285614 - DNA, 25 bp, probe
tcaatttctttgggtgtgttctgcc

SEQ ID NO: 285615 - DNA, 25 bp, probe
tcaattaccgtggcacactttctgg

SEQ ID NO: 285616 - DNA, 25 bp, probe
taagtagaattatctcttcatctgg

SEQ ID NO: 285617 - DNA, 25 bp, probe
taatctaaactgtagctgtattagc

SEQ ID NO: 285618 - DNA, 25 bp, probe
taatgggcccgaggcttagtcagca

SEQ ID NO: 285619 - DNA, 25 bp, probe
taatgggcccgaggcttagtcagca

SEQ ID NO: 285620 - DNA, 25 bp, probe
tcaagcggtccgaggtggaagaagt

SEQ ID NO: 285621 - DNA, 25 bp, probe
taacggaggcggtgggaggataggg

SEQ ID NO: 285622 - DNA, 25 bp, probe
tcaagggtagggtgggccttcaggg

SEQ ID NO: 285623 - DNA, 25 bp, probe
tcaagaggtgggagggccctccgac

SEQ ID NO: 285624 - DNA, 25 bp, probe
taactctgagggggggcacccagtg

SEQ ID NO: 285625 - DNA, 25 bp, probe
tcaagctgctgaaggagggccaccg

SEQ ID NO: 285626 - DNA, 25 bp, probe
tcaagctctgggagggtctcacgga

SEQ ID NO: 285627 - DNA, 25 bp, probe
tcaatggtgaggatgcggtccccta

SEQ ID NO: 285628 - DNA, 25 bp, probe
tcaagctggaggacttggtgccccc

SEQ ID NO: 285629 - DNA, 25 bp, probe
tcaagtctgggttctggtgtccact

SEQ ID NO: 285630 - DNA, 25 bp, probe
taactgtgttgcactggtttcgctc

SEQ ID NO: 285631 - DNA, 25 bp, probe
taactgtgttgcactggtttcgctc

SEQ ID NO: 285632 - DNA, 25 bp, probe
taagggttgcggcgtgatgtcttca

SEQ ID NO: 285633 - DNA, 25 bp, probe
taaaggttatggcgttggcactccc

SEQ ID NO: 285634 - DNA, 25 bp, probe
taaaggttatggcgttggcactccc

SEQ ID NO: 285635 - DNA, 25 bp, probe
ttgaacggaaggagattgacccacc

SEQ ID NO: 285636 - DNA, 25 bp, probe
ttaataaaaggacgatctgcccctg

SEQ ID NO: 285637 - DNA, 25 bp, probe
taaagaaaacgtcgattcgcaccgt

SEQ ID NO: 285638 - DNA, 25 bp, probe
taaggaaggacctcatctacacgtg

SEQ ID NO: 285639 - DNA, 25 bp, probe
taaggaaaaccgtaaacacagagct

SEQ ID NO: 285640 - DNA, 25 bp, probe
taagtaacaacgacctagaaaagtg

SEQ ID NO: 285641 - DNA, 25 bp, probe
taatgaggacattcgtccggaaaag

SEQ ID NO: 285642 - DNA, 25 bp, probe
tcaagagtgaaatgtaggggaggag

SEQ ID NO: 285643 - DNA, 25 bp, probe
taagggcaaaggagttggattgctg

SEQ ID NO: 285644 - DNA, 25 bp, probe
taagggcaaaggagttggattgctg

SEQ ID NO: 285645 - DNA, 25 bp, probe
tacgggaggcgagtggttggtgggc

SEQ ID NO: 285646 - DNA, 25 bp, probe
taagggagctgctgtttaggtggtg

SEQ ID NO: 285647 - DNA, 25 bp, probe
taacttactctgtgttcaggtgtgg

SEQ ID NO: 285648 - DNA, 25 bp, probe
taattgttcctgttttcatctagtc

SEQ ID NO: 285649 - DNA, 25 bp, probe
taatttggccgcatttatcatcata

SEQ ID NO: 285650 - DNA, 25 bp, probe
tcaactgtacgcctttggtatctga

SEQ ID NO: 285651 - DNA, 25 bp, probe
tcaaccttgccctattgagaaagga

SEQ ID NO: 285652 - DNA, 25 bp, probe
taaccttgtcctaatacgctatgtg

SEQ ID NO: 285653 - DNA, 25 bp, probe
tcaaccttgccacagtagcgtaaca

SEQ ID NO: 285654 - DNA, 25 bp, probe
tcaaccctgtcgctttggaaaactc

SEQ ID NO: 285655 - DNA, 25 bp, probe
tcaattccatatcagttctggaaga

SEQ ID NO: 285656 - DNA, 25 bp, probe
tcaattactaccctttcacaagcta

SEQ ID NO: 285657 - DNA, 25 bp, probe
taattacccacaaatgccaccagta

SEQ ID NO: 285658 - DNA, 25 bp, probe
taatctacacccttaggaacaaaga

SEQ ID NO: 285659 - DNA, 25 bp, probe
ttactataacaacagtaccaaggtg

SEQ ID NO: 285660 - DNA, 25 bp, probe
ttacctcccaaaggttctgcagggg

SEQ ID NO: 285661 - DNA, 25 bp, probe
ttccctccaaacttcatcattcggg

SEQ ID NO: 285662 - DNA, 25 bp, probe
taccccccatacttatatcaaggtc

SEQ ID NO: 285663 - DNA, 25 bp, probe
taatccccaaactttgaagggccag

SEQ ID NO: 285664 - DNA, 25 bp, probe
tacacccctaatttggccaggggcg

SEQ ID NO: 285665 - DNA, 25 bp, probe
tacacccctaatttggccaggggcg

SEQ ID NO: 285666 - DNA, 25 bp, probe
taaacccagagctcaaccagaaggg

SEQ ID NO: 285667 - DNA, 25 bp, probe
taatagccactagcagaacaaaagg

SEQ ID NO: 285668 - DNA, 25 bp, probe
taatctccctcaaagaaaatttcct

SEQ ID NO: 285669 - DNA, 25 bp, probe
taatgtccccatgtgaaagcgtctc

SEQ ID NO: 285670 - DNA, 25 bp, probe
taagtactttcgttaatcttgctgc

SEQ ID NO: 285671 - DNA, 25 bp, probe
taagtggcttcccattaacctgagg

SEQ ID NO: 285672 - DNA, 25 bp, probe
tcaagatggcttgtgtctattcaaa

SEQ ID NO: 285673 - DNA, 25 bp, probe
tcaagctctcttgttctgacacaat

SEQ ID NO: 285674 - DNA, 25 bp, probe
tcaatcaccttgcatttcaaaatgg

SEQ ID NO: 285675 - DNA, 25 bp, probe
tcaatacacacccattgacaaatat

SEQ ID NO: 285676 - DNA, 25 bp, probe
tcaaaatccacacttacggaagccc

SEQ ID NO: 285677 - DNA, 25 bp, probe
tcaattatccattcttataagaagg

SEQ ID NO: 285678 - DNA, 25 bp, probe
taatccccattaacaaagaagggtg

SEQ ID NO: 285679 - DNA, 25 bp, probe
taatacctttacaacgagacgacga

SEQ ID NO: 285680 - DNA, 25 bp, probe
taaaacattacagttgccaaggagg

SEQ ID NO: 285681 - DNA, 25 bp, probe
taaagagcatttacttgccccactg

SEQ ID NO: 285682 - DNA, 25 bp, probe
tcaacaggctttactctgacattca

SEQ ID NO: 285683 - DNA, 25 bp, probe
tcaacaggctttactctgacattca

SEQ ID NO: 285684 - DNA, 25 bp, probe
tcaacagcctggaagactggcacca

SEQ ID NO: 285685 - DNA, 25 bp, probe
tcaattgccaaggggccgcatcgca

SEQ ID NO: 285686 - DNA, 25 bp, probe
tatcaatgtaagccatcccggccag

SEQ ID NO: 285687 - DNA, 25 bp, probe
tcaactggaacgaccagcgctgcaa

SEQ ID NO: 285688 - DNA, 25 bp, probe
tcaactggatcattgttcacatgga

SEQ ID NO: 285689 - DNA, 25 bp, probe
tcaactagaataatctacattgata

SEQ ID NO: 285690 - DNA, 25 bp, probe
tcaagccagaaaatctcatcctaga

SEQ ID NO: 285691 - DNA, 25 bp, probe
taatccagaataactagcaccaggg

SEQ ID NO: 285692 - DNA, 25 bp, probe
taatcctgcttgctctggcaacagg

SEQ ID NO: 285693 - DNA, 25 bp, probe
tcaacatcttttactggatcacata

SEQ ID NO: 285694 - DNA, 25 bp, probe
tcaacatcttttactggatcacata

SEQ ID NO: 285695 - DNA, 25 bp, probe
tcaatatatcatcctttggcatccc

SEQ ID NO: 285696 - DNA, 25 bp, probe
tcaagatcactgactttggcctctg

SEQ ID NO: 285697 - DNA, 25 bp, probe
tcaattcctggtttaccagctgctg

SEQ ID NO: 285698 - DNA, 25 bp, probe
taatatcacggttaaaagctgctgc

SEQ ID NO: 285699 - DNA, 25 bp, probe
taatacaggtttacagttcatgcct

SEQ ID NO: 285700 - DNA, 25 bp, probe
tcaatttgtcttttagtagcagcct

SEQ ID NO: 285701 - DNA, 25 bp, probe
taatttgtttaccgttgctgctcat

SEQ ID NO: 285702 - DNA, 25 bp, probe
tcaagttcttcttctggatcggcta

SEQ ID NO: 285703 - DNA, 25 bp, probe
tcaacctgcctgaactggccatggt

SEQ ID NO: 285704 - DNA, 25 bp, probe
taattcagctctaccaggcagcagg

SEQ ID NO: 285705 - DNA, 25 bp, probe
tcaagtgcctgcaccaggggtgcac

SEQ ID NO: 285706 - DNA, 25 bp, probe
tcaactgcctccatctgtggggcag

SEQ ID NO: 285707 - DNA, 25 bp, probe
tcaattatcttcatgaaggaggaga

SEQ ID NO: 285708 - DNA, 25 bp, probe
tcaatctatttgctggagtctagga

SEQ ID NO: 285709 - DNA, 25 bp, probe
taatgcttgcattgtgctgggtcct

SEQ ID NO: 285710 - DNA, 25 bp, probe
taatgcttgcattgtgctgggtcct

SEQ ID NO: 285711 - DNA, 25 bp, probe
taatgaatcatcggcttggtactga

SEQ ID NO: 285712 - DNA, 25 bp, probe
taatgaatcatcggcttggtactga

SEQ ID NO: 285713 - DNA, 25 bp, probe
taaattgcttctgagggtctgaaat

SEQ ID NO: 285714 - DNA, 25 bp, probe
taatatggcatttaagaggtgaaag

SEQ ID NO: 285715 - DNA, 25 bp, probe
taatatgatgttttaagtgtgcaaa

SEQ ID NO: 285716 - DNA, 25 bp, probe
tcaagatgatttttgctatcgtgca

SEQ ID NO: 285717 - DNA, 25 bp, probe
tcaagagattctcctgcttcagctc

SEQ ID NO: 285718 - DNA, 25 bp, probe
tcaagagattctcctgcttcagctc

SEQ ID NO: 285719 - DNA, 25 bp, probe
tcaagaagcctaagcttggctttaa

SEQ ID NO: 285720 - DNA, 25 bp, probe
tcaagaaggcctatgtggaggccaa

SEQ ID NO: 285721 - DNA, 25 bp, probe
taatacatgacctaggggaggccta

SEQ ID NO: 285722 - DNA, 25 bp, probe
taataatgactctaaagaaacagaa

SEQ ID NO: 285723 - DNA, 25 bp, probe
taataggagtcatatatagatacat

SEQ ID NO: 285724 - DNA, 25 bp, probe
tactaagggagttcattgatttggt

SEQ ID NO: 285725 - DNA, 25 bp, probe
tactaagggatgcagtggagtgtgg

SEQ ID NO: 285726 - DNA, 25 bp, probe
taataacgagttctctagcgctagt

SEQ ID NO: 285727 - DNA, 25 bp, probe
taataacatggtcatttccggagta

SEQ ID NO: 285728 - DNA, 25 bp, probe
taaacacggaagattcgcggatgat

SEQ ID NO: 285729 - DNA, 25 bp, probe
taaacacaaaatccattccaggtag

SEQ ID NO: 285730 - DNA, 25 bp, probe
taaacagaaccactaccaagagctc

SEQ ID NO: 285731 - DNA, 25 bp, probe
tcaactcaaaacgcatccaagatct

SEQ ID NO: 285732 - DNA, 25 bp, probe
tcaagtcactaagtcgcatcacaga

SEQ ID NO: 285733 - DNA, 25 bp, probe
taagtgcatgcattgagctgcctcc

SEQ ID NO: 285734 - DNA, 25 bp, probe
tactgtgcagaccacatggctcttc

SEQ ID NO: 285735 - DNA, 25 bp, probe
tactgtgcagaccacatggctcttc

SEQ ID NO: 285736 - DNA, 25 bp, probe
taatgtcagtctacaggcctttcag

SEQ ID NO: 285737 - DNA, 25 bp, probe
tcaagtggatcgacaggtccatgaa

SEQ ID NO: 285738 - DNA, 25 bp, probe
tcaagtacatcgcagagaccatgaa

SEQ ID NO: 285739 - DNA, 25 bp, probe
tcaagccctctgaaagaatctacat

SEQ ID NO: 285740 - DNA, 25 bp, probe
taatgccacctcaggaattaactgg

SEQ ID NO: 285741 - DNA, 25 bp, probe
tcaaggccatcctggttctatactg

SEQ ID NO: 285742 - DNA, 25 bp, probe
tcaaccgcatctatggtttctacga

SEQ ID NO: 285743 - DNA, 25 bp, probe
tagacctcacttacgttacagaacg

SEQ ID NO: 285744 - DNA, 25 bp, probe
tcaagctcctcaatgacgtgtacag

SEQ ID NO: 285745 - DNA, 25 bp, probe
tcaacctcatcaagactggtgtctg

SEQ ID NO: 285746 - DNA, 25 bp, probe
tcaatgcctgaaagagacttgtgag

SEQ ID NO: 285747 - DNA, 25 bp, probe
tcaagcgctacgagacgctggaggt

SEQ ID NO: 285748 - DNA, 25 bp, probe
tcaagagcttcgagagccagtgttg

SEQ ID NO: 285749 - DNA, 25 bp, probe
tcaagagcccaatgcattccatttc

SEQ ID NO: 285750 - DNA, 25 bp, probe
taacagggcagttcattccaaatcc

SEQ ID NO: 285751 - DNA, 25 bp, probe
taatcagtagcttgaaaccacaatt

SEQ ID NO: 285752 - DNA, 25 bp, probe
tcaatatgtacctcatactcatcat

SEQ ID NO: 285753 - DNA, 25 bp, probe
tcaattgtcactgtcatcagaatct

SEQ ID NO: 285754 - DNA, 25 bp, probe
tcaattgtcactgtcatcagaatct

SEQ ID NO: 285755 - DNA, 25 bp, probe
tcaacttgacgcttgcaaaattacc

SEQ ID NO: 285756 - DNA, 25 bp, probe
tcaacttcaccactcaagaactgtc

SEQ ID NO: 285757 - DNA, 25 bp, probe
taatttcacactcaagatccctctt

SEQ ID NO: 285758 - DNA, 25 bp, probe
taatacaacacgccggactgactct

SEQ ID NO: 285759 - DNA, 25 bp, probe
taataaaaagctcttctcatcctcc

SEQ ID NO: 285760 - DNA, 25 bp, probe
tcaataaaaagcttcaccccctggc

SEQ ID NO: 285761 - DNA, 25 bp, probe
taataaaaggacgatctgcccctgg

SEQ ID NO: 285762 - DNA, 25 bp, probe
tcaagaaagtcaaagaccaccgagg

SEQ ID NO: 285763 - DNA, 25 bp, probe
tcaagaactgtacaagctgccctag

SEQ ID NO: 285764 - DNA, 25 bp, probe
tcaagaactgtacaagctgccctag

SEQ ID NO: 285765 - DNA, 25 bp, probe
tcaagcaacagcactttctgtagta

SEQ ID NO: 285766 - DNA, 25 bp, probe
tcaagaagcaattgattttattgac

SEQ ID NO: 285767 - DNA, 25 bp, probe
tcaagaagtcattatctcaaactga

SEQ ID NO: 285768 - DNA, 25 bp, probe
tcaagaagtcattatctcaaactga

SEQ ID NO: 285769 - DNA, 25 bp, probe
tcaataattttgaccaagactttac

SEQ ID NO: 285770 - DNA, 25 bp, probe
tcaactatttctaatgggacttttc

SEQ ID NO: 285771 - DNA, 25 bp, probe
taagttttcctctgtgcaaatttaa

SEQ ID NO: 285772 - DNA, 25 bp, probe
taagttcctacctgactatgctttc

SEQ ID NO: 285773 - DNA, 25 bp, probe
taagaacacaacgaccagctatggt

SEQ ID NO: 285774 - DNA, 25 bp, probe
tcaatgagatcaaaccccctattat

SEQ ID NO: 285775 - DNA, 25 bp, probe
taagcaatacgaggccaccttcagt

SEQ ID NO: 285776 - DNA, 25 bp, probe
taagcaatacgaggccaccttcagt

SEQ ID NO: 285777 - DNA, 25 bp, probe
tcaagaaacgagcatacccagcagt

SEQ ID NO: 285778 - DNA, 25 bp, probe
tcaagaacagccctattcccagctg

SEQ ID NO: 285779 - DNA, 25 bp, probe
tcaagaacagccctattcccagctg

SEQ ID NO: 285780 - DNA, 25 bp, probe
tcaacgacatcgtgattctccagct

SEQ ID NO: 285781 - DNA, 25 bp, probe
tcaacgacatcgtgattctccagct

SEQ ID NO: 285782 - DNA, 25 bp, probe
tcaaggcctcgaagtcattccgcca

SEQ ID NO: 285783 - DNA, 25 bp, probe
tcaactgacctatttcttcacggca

SEQ ID NO: 285784 - DNA, 25 bp, probe
tcaaccagccatctacttcttggct

SEQ ID NO: 285785 - DNA, 25 bp, probe
tcaactctcaatctatttgctggag

SEQ ID NO: 285786 - DNA, 25 bp, probe
tcaacccaatcctttatgtttttat

SEQ ID NO: 285787 - DNA, 25 bp, probe
taattctcgctggttttgtttttat

SEQ ID NO: 285788 - DNA, 25 bp, probe
taaggtgcctcgtttttgactttgt

SEQ ID NO: 285789 - DNA, 25 bp, probe
taaggtgcctcgtttttgactttgt

SEQ ID NO: 285790 - DNA, 25 bp, probe
tcaagtagccccagatttagcttac

SEQ ID NO: 285791 - DNA, 25 bp, probe
tcaatgacaggttccgtctgggctt

SEQ ID NO: 285792 - DNA, 25 bp, probe
tcaataaagctttctgtttgtgttc

SEQ ID NO: 285793 - DNA, 25 bp, probe
taatattagccttgtctttgatttt

SEQ ID NO: 285794 - DNA, 25 bp, probe
tcaataacaccaatgttttgttttg

SEQ ID NO: 285795 - DNA, 25 bp, probe
tcaataactctactcatttgtatct

SEQ ID NO: 285796 - DNA, 25 bp, probe
tcaagaacttcaacctctttctcgc

SEQ ID NO: 285797 - DNA, 25 bp, probe
tcaacgagactcaattcctattcat

SEQ ID NO: 285798 - DNA, 25 bp, probe
tcaacgagaatcactctggagagct

SEQ ID NO: 285799 - DNA, 25 bp, probe
tcaagcgagctagcccttgtgagct

SEQ ID NO: 285800 - DNA, 25 bp, probe
tcaagaggcaacgctctctctacat

SEQ ID NO: 285801 - DNA, 25 bp, probe
tcaagatgtcctccttgttctactc

SEQ ID NO: 285802 - DNA, 25 bp, probe
tcaaggtcgctggatgctgatctaa

SEQ ID NO: 285803 - DNA, 25 bp, probe
tcaagtcactgctctgtgttaaagt

SEQ ID NO: 285804 - DNA, 25 bp, probe
tcaagcatccatcactgagagaaga

SEQ ID NO: 285805 - DNA, 25 bp, probe
tcaatgcgaaggacgcgcaaatgca

SEQ ID NO: 285806 - DNA, 25 bp, probe
tcaagcgcatagcagcactgccacc

SEQ ID NO: 285807 - DNA, 25 bp, probe
tcaagcgcatagcagcactgccacc

SEQ ID NO: 285808 - DNA, 25 bp, probe
tcaatgcactaatgcctggcactcc

SEQ ID NO: 285809 - DNA, 25 bp, probe
tcaatgccttctacagtgcatccac

SEQ ID NO: 285810 - DNA, 25 bp, probe
tcaatggctctcagcatccatcatc

SEQ ID NO: 285811 - DNA, 25 bp, probe
tcaatggctctcagcatccatcatc

SEQ ID NO: 285812 - DNA, 25 bp, probe
tcaagctgtcctgctcagatatctt

SEQ ID NO: 285813 - DNA, 25 bp, probe
tcaagagatccatctcacagggtta

SEQ ID NO: 285814 - DNA, 25 bp, probe
tcaagagttgtaggatgcagggcta

SEQ ID NO: 285815 - DNA, 25 bp, probe
tcaagaaatgaaggtgcagctggta

SEQ ID NO: 285816 - DNA, 25 bp, probe
tcaatgagacggtgctcactgtgtg

SEQ ID NO: 285817 - DNA, 25 bp, probe
tcaatatatatactcctcactgtgt

SEQ ID NO: 285818 - DNA, 25 bp, probe
taatcaatggcaatcctcatatctt

SEQ ID NO: 285819 - DNA, 25 bp, probe
tcaagcactggaacacgatcctctt

SEQ ID NO: 285820 - DNA, 25 bp, probe
tcaagcactcttaaaaccacttaaa

SEQ ID NO: 285821 - DNA, 25 bp, probe
tcaagcactcttaaaaccacttaaa

SEQ ID NO: 285822 - DNA, 25 bp, probe
taatcagtgcttaccacaccacgaa

SEQ ID NO: 285823 - DNA, 25 bp, probe
taatgcagtttgaccacaatgccgg

SEQ ID NO: 285824 - DNA, 25 bp, probe
tacggtcacgtctacaaggcgaggc

SEQ ID NO: 285825 - DNA, 25 bp, probe
tacggtcacgtctacaaggcgaggc

SEQ ID NO: 285826 - DNA, 25 bp, probe
taatggtagctttagaagactcagg

SEQ ID NO: 285827 - DNA, 25 bp, probe
tcaatcttgactagattaagagtca

SEQ ID NO: 285828 - DNA, 25 bp, probe
taattattctcattcttaggtgcat

SEQ ID NO: 285829 - DNA, 25 bp, probe
taagatggtgccttcgtgaaggctt

SEQ ID NO: 285830 - DNA, 25 bp, probe
tcaagagggctttcgaggctgcggt

SEQ ID NO: 285831 - DNA, 25 bp, probe
tcaagagggctttcgaggctgcggt

SEQ ID NO: 285832 - DNA, 25 bp, probe
tcaagagcaagttctcgggagcggt

SEQ ID NO: 285833 - DNA, 25 bp, probe
tcaagagcaagttctcgggagcggt

SEQ ID NO: 285834 - DNA, 25 bp, probe
tcaacccagagacgggcgagcagat

SEQ ID NO: 285835 - DNA, 25 bp, probe
taacctagaggccaccgagaaacat

SEQ ID NO: 285836 - DNA, 25 bp, probe
taatccatattggcagaacgaaaac

SEQ ID NO: 285837 - DNA, 25 bp, probe
taatcttcgtccacaagacacagac

SEQ ID NO: 285838 - DNA, 25 bp, probe
taattttgttcaccgagatctggcc

SEQ ID NO: 285839 - DNA, 25 bp, probe
taatgtatattctccttgagcccca

SEQ ID NO: 285840 - DNA, 25 bp, probe
tcaagtgtgagttacctgctgagcc

SEQ ID NO: 285841 - DNA, 25 bp, probe
tcaaccagaacttcctgctgactgc

SEQ ID NO: 285842 - DNA, 25 bp, probe
tcaacgcagtaattcccatctgcct

SEQ ID NO: 285843 - DNA, 25 bp, probe
tcaacgcagtaattcccatctgcct

SEQ ID NO: 285844 - DNA, 25 bp, probe
tcaagcgctgaagatccatgtctcc

SEQ ID NO: 285845 - DNA, 25 bp, probe
taatgtgggcagcatatagaacaca

SEQ ID NO: 285846 - DNA, 25 bp, probe
taatttgctgattattcaaccacag

SEQ ID NO: 285847 - DNA, 25 bp, probe
taattgatggattcttccatcctgc

SEQ ID NO: 285848 - DNA, 25 bp, probe
taattctgttcatcatttcactccg

SEQ ID NO: 285849 - DNA, 25 bp, probe
tcaatccagttctctatgtcttcat

SEQ ID NO: 285850 - DNA, 25 bp, probe
tcaatccagttctctatgtcttcat

SEQ ID NO: 285851 - DNA, 25 bp, probe
tcaaccacttcattatgagactatt

SEQ ID NO: 285852 - DNA, 25 bp, probe
taaaatcaatgatcgagaaggtgac

SEQ ID NO: 285853 - DNA, 25 bp, probe
taaattctaatacttgaagtggacc

SEQ ID NO: 285854 - DNA, 25 bp, probe
taagatctctaatctgttttgagtc

SEQ ID NO: 285855 - DNA, 25 bp, probe
taatacttagatcctccttatactc

SEQ ID NO: 285856 - DNA, 25 bp, probe
taatactcttattatcctatttctg

SEQ ID NO: 285857 - DNA, 25 bp, probe
taatgagccgttaagtcttttctga

SEQ ID NO: 285858 - DNA, 25 bp, probe
taatggacttggtagtttttctatt

SEQ ID NO: 285859 - DNA, 25 bp, probe
taatggacttggtagtttttctatt

SEQ ID NO: 285860 - DNA, 25 bp, probe
taatgaaccacgtgttttgacatca

SEQ ID NO: 285861 - DNA, 25 bp, probe
taatgaaccacgtgttttgacatca

SEQ ID NO: 285862 - DNA, 25 bp, probe
taatcatcaccaccggtgtttccat

SEQ ID NO: 285863 - DNA, 25 bp, probe
taatatccgcagcctgggctactca

SEQ ID NO: 285864 - DNA, 25 bp, probe
taatatccgcagcctgggctactca

SEQ ID NO: 285865 - DNA, 25 bp, probe
tcaagatcgcagacctgggcaacgc

SEQ ID NO: 285866 - DNA, 25 bp, probe
tcaagaccagcctggccaacatggt

SEQ ID NO: 285867 - DNA, 25 bp, probe
tcaatcctaggctggttactgtgta

SEQ ID NO: 285868 - DNA, 25 bp, probe
taacctagacaaggattccgcttat

SEQ ID NO: 285869 - DNA, 25 bp, probe
taaccttgaagggttcaccaggtca

SEQ ID NO: 285870 - DNA, 25 bp, probe
tcaagcagtgtgaatgggttcccag

SEQ ID NO: 285871 - DNA, 25 bp, probe
tcaagcagtgtgaatgggttcccag

SEQ ID NO: 285872 - DNA, 25 bp, probe
tcaagagctccaatggggtctccag

SEQ ID NO: 285873 - DNA, 25 bp, probe
tcaagacgctcaagtcgggctacac

SEQ ID NO: 285874 - DNA, 25 bp, probe
tcaagaacagctttctgggctcacc

SEQ ID NO: 285875 - DNA, 25 bp, probe
tcaagaacagctttctgggctcacc

SEQ ID NO: 285876 - DNA, 25 bp, probe
tcaagcagagcacattcccagcttc

SEQ ID NO: 285877 - DNA, 25 bp, probe
tcaagcaaggataccgccatgtcca

SEQ ID NO: 285878 - DNA, 25 bp, probe
tcaatgccagtaacgcgtcttcctg

SEQ ID NO: 285879 - DNA, 25 bp, probe
tcaatgccagtaacgcgtcttcctg

SEQ ID NO: 285880 - DNA, 25 bp, probe
tcaatgccatcgagcaggactaccg

SEQ ID NO: 285881 - DNA, 25 bp, probe
taatgcaacgcaggaggagaaaaga

SEQ ID NO: 285882 - DNA, 25 bp, probe
tacatgtaccagcggaaggaaggaa

SEQ ID NO: 285883 - DNA, 25 bp, probe
taatggccaggccggaaccaaaaag

SEQ ID NO: 285884 - DNA, 25 bp, probe
tcaatggctcccctgaaatcaagac

SEQ ID NO: 285885 - DNA, 25 bp, probe
tcaaggcttatgctaacaggagact

SEQ ID NO: 285886 - DNA, 25 bp, probe
tcaaggtgttgcttatctccatgag

SEQ ID NO: 285887 - DNA, 25 bp, probe
tcaaggttgtgacctccacagacgt

SEQ ID NO: 285888 - DNA, 25 bp, probe
tcaagccatagtacccctacaagtg

SEQ ID NO: 285889 - DNA, 25 bp, probe
tcaagcatctaagcccaggacatga

SEQ ID NO: 285890 - DNA, 25 bp, probe
tcaagtccaagcatcataggattat

SEQ ID NO: 285891 - DNA, 25 bp, probe
tcaagtccaagcatcataggattat

SEQ ID NO: 285892 - DNA, 25 bp, probe
tcaagtcgggctacacggagaagca

SEQ ID NO: 285893 - DNA, 25 bp, probe
tcaagttggtgtaatcagctgggga

SEQ ID NO: 285894 - DNA, 25 bp, probe
tcaagtgtgcggagacaggcggctg

SEQ ID NO: 285895 - DNA, 25 bp, probe
tcaagaatgctggacgtcggctggc

SEQ ID NO: 285896 - DNA, 25 bp, probe
tcaagaagccaacgctgagtcaggc

SEQ ID NO: 285897 - DNA, 25 bp, probe
tcaagaagactcgctaccaggctgg

SEQ ID NO: 285898 - DNA, 25 bp, probe
tcaagaagactcgctaccaggctgg

SEQ ID NO: 285899 - DNA, 25 bp, probe
tcaagagagaccttctacaggatct

SEQ ID NO: 285900 - DNA, 25 bp, probe
taatggaagttctaacaggatgtag

SEQ ID NO: 285901 - DNA, 25 bp, probe
taaggaatttttgcccagtcgttct

SEQ ID NO: 285902 - DNA, 25 bp, probe
taaaagattttctgtagtgtttttg

SEQ ID NO: 285903 - DNA, 25 bp, probe
taaaagttcatttttacagcttttg

SEQ ID NO: 285904 - DNA, 25 bp, probe
taaaagtccttcatacaccttctgg

SEQ ID NO: 285905 - DNA, 25 bp, probe
taagtcagtcctggcagttgcctct

SEQ ID NO: 285906 - DNA, 25 bp, probe
tcaagctatgaggacagcagcctgc

SEQ ID NO: 285907 - DNA, 25 bp, probe
tcaagcaatagttctagcctgcctt

SEQ ID NO: 285908 - DNA, 25 bp, probe
taatcaaaacactgcttcatgctgg

SEQ ID NO: 285909 - DNA, 25 bp, probe
taataacaacaccgtgcgcatgatc

SEQ ID NO: 285910 - DNA, 25 bp, probe
taataacaacaccgtgcgcatgatc

SEQ ID NO: 285911 - DNA, 25 bp, probe
taatgaacaaaacctgtctaaacct

SEQ ID NO: 285912 - DNA, 25 bp, probe
taatggatcaactcctatgcataaa

SEQ ID NO: 285913 - DNA, 25 bp, probe
tcaagttcaacaccccaaaaatgca

SEQ ID NO: 285914 - DNA, 25 bp, probe
taagatttaaccaacatcaacaaaa

SEQ ID NO: 285915 - DNA, 25 bp, probe
tcaagaagatcaacaaacagaactt

SEQ ID NO: 285916 - DNA, 25 bp, probe
tcaagaaaacgctggagaacttctg

SEQ ID NO: 285917 - DNA, 25 bp, probe
taagaaaacggggaccacagtgcca

SEQ ID NO: 285918 - DNA, 25 bp, probe
taagaagaatggcggcaccctctac

SEQ ID NO: 285919 - DNA, 25 bp, probe
taagaagaatggcggcaccctctac

SEQ ID NO: 285920 - DNA, 25 bp, probe
tcaagaatgtacagtggctccccaa

SEQ ID NO: 285921 - DNA, 25 bp, probe
taaggttatcactgtgctcaccagg

SEQ ID NO: 285922 - DNA, 25 bp, probe
tcaatgtttaactcagctcaaaggg

SEQ ID NO: 285923 - DNA, 25 bp, probe
taattgctgtggatactgtaaaggg

SEQ ID NO: 285924 - DNA, 25 bp, probe
taattggttgtcactgttgtacggt

SEQ ID NO: 285925 - DNA, 25 bp, probe
taattgcagtttctctgttctttgg

SEQ ID NO: 285926 - DNA, 25 bp, probe
taattgcagtttctctgttctttgg

SEQ ID NO: 285927 - DNA, 25 bp, probe
taataggtttgcccttgcatctcat

SEQ ID NO: 285928 - DNA, 25 bp, probe
taataggtttgcccttgcatctcat

SEQ ID NO: 285929 - DNA, 25 bp, probe
taatttgtgttccctgatcactcgt

SEQ ID NO: 285930 - DNA, 25 bp, probe
taaatctgagtccccagaacctagt

SEQ ID NO: 285931 - DNA, 25 bp, probe
taaatatttctccagcaaatttgag

SEQ ID NO: 285932 - DNA, 25 bp, probe
tacacttctttgcaccagagtatgg

SEQ ID NO: 285933 - DNA, 25 bp, probe
taattaaactgtaccaggtcatcag

SEQ ID NO: 285934 - DNA, 25 bp, probe
tagattcaaaggttctaggtttcaa

SEQ ID NO: 285935 - DNA, 25 bp, probe
tagattcaaaggttctaggtttcaa

SEQ ID NO: 285936 - DNA, 25 bp, probe
taattctaagacttttgaattttca

SEQ ID NO: 285937 - DNA, 25 bp, probe
tacatttcaaactttatttgctttg

SEQ ID NO: 285938 - DNA, 25 bp, probe
tactataaaagcatgccaaatcttg

SEQ ID NO: 285939 - DNA, 25 bp, probe
tacttcatgacacttggaaaacttg

SEQ ID NO: 285940 - DNA, 25 bp, probe
taatatactcatcatagaaaacttg

SEQ ID NO: 285941 - DNA, 25 bp, probe
taattacatgctcctggaaatttta

SEQ ID NO: 285942 - DNA, 25 bp, probe
taatacactgctatggaggacttgg

SEQ ID NO: 285943 - DNA, 25 bp, probe
tcaaggcaactagtggagagaactg

SEQ ID NO: 285944 - DNA, 25 bp, probe
tcaagtgcgagccacaggaaaaatg

SEQ ID NO: 285945 - DNA, 25 bp, probe
tcaagtcgcagatagagaaggaagg

SEQ ID NO: 285946 - DNA, 25 bp, probe
tcaagacgctgtaaacctctgaagg

SEQ ID NO: 285947 - DNA, 25 bp, probe
tcaagacgctgtaaacctctgaagg

SEQ ID NO: 285948 - DNA, 25 bp, probe
tcaagacgctgtaaacctctgaagg

SEQ ID NO: 285949 - DNA, 25 bp, probe
tcaagactgtggcaaccatcaccgc

SEQ ID NO: 285950 - DNA, 25 bp, probe
tcaagggtgaggcagagacccgcgt

SEQ ID NO: 285951 - DNA, 25 bp, probe
taaggagagggactggaccccctgg

SEQ ID NO: 285952 - DNA, 25 bp, probe
taaggaagggattggaagtcgaaga

SEQ ID NO: 285953 - DNA, 25 bp, probe
taaggaagggattggaagtcgaaga

SEQ ID NO: 285954 - DNA, 25 bp, probe
taaagaaggaactgccgcccaggga

SEQ ID NO: 285955 - DNA, 25 bp, probe
taccagagggaacacggcctactga

SEQ ID NO: 285956 - DNA, 25 bp, probe
taccaaaggcaacaagcgatcccga

SEQ ID NO: 285957 - DNA, 25 bp, probe
tacctaacctaagctgcttcctgga

SEQ ID NO: 285958 - DNA, 25 bp, probe
tacatcaatacctgaccttttttaa

SEQ ID NO: 285959 - DNA, 25 bp, probe
taataatacttccaatttttttcat

SEQ ID NO: 285960 - DNA, 25 bp, probe
taatagtctattttttcttttgtat

SEQ ID NO: 285961 - DNA, 25 bp, probe
tcaagttaattcttcttgttcttgt

SEQ ID NO: 285962 - DNA, 25 bp, probe
taatgctcagagatcttttttcact

SEQ ID NO: 285963 - DNA, 25 bp, probe
taagtccgttatgtttagagtagaa

SEQ ID NO: 285964 - DNA, 25 bp, probe
taagcccgttaccttttaattgcat

SEQ ID NO: 285965 - DNA, 25 bp, probe
tacacccgttacttcgtatcgaata

SEQ ID NO: 285966 - DNA, 25 bp, probe
tcaatccccttgtcgaaaactagaa

SEQ ID NO: 285967 - DNA, 25 bp, probe
tcaatccccttatctgtagtcttag

SEQ ID NO: 285968 - DNA, 25 bp, probe
tcaattaccttagcagcaactgttt

SEQ ID NO: 285969 - DNA, 25 bp, probe
taattattgttatacacagctttat

SEQ ID NO: 285970 - DNA, 25 bp, probe
taatatattattttatctactttat

SEQ ID NO: 285971 - DNA, 25 bp, probe
taatatattattttatctactttat

SEQ ID NO: 285972 - DNA, 25 bp, probe
taatttctctaatactgacctttct

SEQ ID NO: 285973 - DNA, 25 bp, probe
taatttcctcactgcctggtaaaat

SEQ ID NO: 285974 - DNA, 25 bp, probe
taatttcctcactgcctggtaaaat

SEQ ID NO: 285975 - DNA, 25 bp, probe
taatacttctcgtggctggttacca

SEQ ID NO: 285976 - DNA, 25 bp, probe
taaacaagtcctcagtggttggcaa

SEQ ID NO: 285977 - DNA, 25 bp, probe
tacaaaagtctccaagtgtttacca

SEQ ID NO: 285978 - DNA, 25 bp, probe
taaatcaaggctcaaggcttcccca

SEQ ID NO: 285979 - DNA, 25 bp, probe
taaatcaaggctcaaggcttcccca

SEQ ID NO: 285980 - DNA, 25 bp, probe
taattctaggctgaaggactcttca

SEQ ID NO: 285981 - DNA, 25 bp, probe
taactgcaaactggacaggacaccc

SEQ ID NO: 285982 - DNA, 25 bp, probe
taagctgatcctgcggagaacaccc

SEQ ID NO: 285983 - DNA, 25 bp, probe
taattccacccagttgagacacacc

SEQ ID NO: 285984 - DNA, 25 bp, probe
taatttcctcaggtcattgccaacc

SEQ ID NO: 285985 - DNA, 25 bp, probe
taatttcctcaggtcattgccaacc

SEQ ID NO: 285986 - DNA, 25 bp, probe
taattttgcacagacatctcctcac

SEQ ID NO: 285987 - DNA, 25 bp, probe
taatttggagcatagtaccatagaa

SEQ ID NO: 285988 - DNA, 25 bp, probe
tcaattagaagcctcgtaccaatca

SEQ ID NO: 285989 - DNA, 25 bp, probe
taattaaaggctttgcaacaccaaa

SEQ ID NO: 285990 - DNA, 25 bp, probe
tatataaatgggcttcccacccaca

SEQ ID NO: 285991 - DNA, 25 bp, probe
taataaaggttatccataccaataa

SEQ ID NO: 285992 - DNA, 25 bp, probe
taataaaggtttgagctagctagat

SEQ ID NO: 285993 - DNA, 25 bp, probe
taataagaggatcagccgggtgcaa

SEQ ID NO: 285994 - DNA, 25 bp, probe
tcaatatacgttcttcagggtcaaa

SEQ ID NO: 285995 - DNA, 25 bp, probe
taataccaagtccttaggagtctta

SEQ ID NO: 285996 - DNA, 25 bp, probe
taataccaagtgctttgagccccca

SEQ ID NO: 285997 - DNA, 25 bp, probe
taagacaagactcttaatcccctcg

SEQ ID NO: 285998 - DNA, 25 bp, probe
tcaagacaacctgctacaagccctg

SEQ ID NO: 285999 - DNA, 25 bp, probe
taagacctcctgcctaagtgcagcc

SEQ ID NO: 286000 - DNA, 25 bp, probe
tcaagtgctgccctggctgaaggag

SEQ ID NO: 286001 - DNA, 25 bp, probe
tcaagatctgcggtgacatacacgg

SEQ ID NO: 286002 - DNA, 25 bp, probe
taatgagctcgaggaagccacggcg

SEQ ID NO: 286003 - DNA, 25 bp, probe
taatgagctcgaggaagccacggcg

SEQ ID NO: 286004 - DNA, 25 bp, probe
tcaaggtctgaggaactataagcca

SEQ ID NO: 286005 - DNA, 25 bp, probe
taaggactgagccaatcctgccaga

SEQ ID NO: 286006 - DNA, 25 bp, probe
taatcaatttgttacttacagtcca

SEQ ID NO: 286007 - DNA, 25 bp, probe
tcaatcatttttttcccttgtaaat

SEQ ID NO: 286008 - DNA, 25 bp, probe
taaatctttcttaaccgtgaaagca

SEQ ID NO: 286009 - DNA, 25 bp, probe
taaattttgtttctcgtcagcataa

SEQ ID NO: 286010 - DNA, 25 bp, probe
taaattttgtttctcgtcagcataa

SEQ ID NO: 286011 - DNA, 25 bp, probe
taagttttgtgtacagagagatatt

SEQ ID NO: 286012 - DNA, 25 bp, probe
taatgagtttttaaaggctttctat

SEQ ID NO: 286013 - DNA, 25 bp, probe
taatatttatttttggtgcttttat

SEQ ID NO: 286014 - DNA, 25 bp, probe
taatgtttttgtcctaatctcttca

SEQ ID NO: 286015 - DNA, 25 bp, probe
taatttgctttgacatctcactgtt

SEQ ID NO: 286016 - DNA, 25 bp, probe
taatgctccaagtctatgaactgtt

SEQ ID NO: 286017 - DNA, 25 bp, probe
taagcccaggacatgagtgtctgtc

SEQ ID NO: 286018 - DNA, 25 bp, probe
taagcaccgcaatatcgttcagtac

SEQ ID NO: 286019 - DNA, 25 bp, probe
taagcaccgcaatatcgttcagtac

SEQ ID NO: 286020 - DNA, 25 bp, probe
tcaagagactgcgttcttttcagat

SEQ ID NO: 286021 - DNA, 25 bp, probe
tcaagatgactaccagctggttcga

SEQ ID NO: 286022 - DNA, 25 bp, probe
tcaagttctatggagtgtgcggcga

SEQ ID NO: 286023 - DNA, 25 bp, probe
tcaagttctcgctagatgtctgcga

SEQ ID NO: 286024 - DNA, 25 bp, probe
tcaatcctcttttgatgtctgcaga

SEQ ID NO: 286025 - DNA, 25 bp, probe
taatcagctgccaataatatctaat

SEQ ID NO: 286026 - DNA, 25 bp, probe
taatcagctgccaataatatctaat

SEQ ID NO: 286027 - DNA, 25 bp, probe
taacctcctaagtatcaagtataga

SEQ ID NO: 286028 - DNA, 25 bp, probe
taaggctcatcagtggtatccagtt

SEQ ID NO: 286029 - DNA, 25 bp, probe
taagttcaccggtctcgatggcaaa

SEQ ID NO: 286030 - DNA, 25 bp, probe
taatattattaagtccagagagaaa

SEQ ID NO: 286031 - DNA, 25 bp, probe
tacacatttccagttccatgcaacg

SEQ ID NO: 286032 - DNA, 25 bp, probe
tacacatttccagttccatgcaacg

SEQ ID NO: 286033 - DNA, 25 bp, probe
taatagtttcacatcacctcactgc

SEQ ID NO: 286034 - DNA, 25 bp, probe
taattactgtcatttccacatcctt

SEQ ID NO: 286035 - DNA, 25 bp, probe
tcaatccattgatttatctcctcct

SEQ ID NO: 286036 - DNA, 25 bp, probe
tcaaggactgctattctccttcttc

SEQ ID NO: 286037 - DNA, 25 bp, probe
tcaaggtcttgtcatctcttttgct

SEQ ID NO: 286038 - DNA, 25 bp, probe
taagtggcaggtccaatcccattta

SEQ ID NO: 286039 - DNA, 25 bp, probe
tcaaggggcagcttcagaccatgct

SEQ ID NO: 286040 - DNA, 25 bp, probe
tcaagttgagctgtagtgcctgctg

SEQ ID NO: 286041 - DNA, 25 bp, probe
tcaatgttgactggtgggctcttgg

SEQ ID NO: 286042 - DNA, 25 bp, probe
tcaagatggcaatggtagcctgtgg

SEQ ID NO: 286043 - DNA, 25 bp, probe
taaggaggatctggtgagcctgaga

SEQ ID NO: 286044 - DNA, 25 bp, probe
taaggaggatctggtgagcctgaga

SEQ ID NO: 286045 - DNA, 25 bp, probe
taaggtgactcaaacagccaaacga

SEQ ID NO: 286046 - DNA, 25 bp, probe
taatgtttcatatgcagcgacaaag

SEQ ID NO: 286047 - DNA, 25 bp, probe
taatgatggtcaactgcaaggagaa

SEQ ID NO: 286048 - DNA, 25 bp, probe
tcaaggtgctgactctcactgacga

SEQ ID NO: 286049 - DNA, 25 bp, probe
tcaaggctgtcatcactcgagcaga

SEQ ID NO: 286050 - DNA, 25 bp, probe
tcaaggctgtcatcactcgagcaga

SEQ ID NO: 286051 - DNA, 25 bp, probe
taagacagccatccatgtgcatgag

SEQ ID NO: 286052 - DNA, 25 bp, probe
taattcagcacatatgcaatcatat

SEQ ID NO: 286053 - DNA, 25 bp, probe
taattcagcacatatgcaatcatat

SEQ ID NO: 286054 - DNA, 25 bp, probe
taatccgcatgacagataatatgta

SEQ ID NO: 286055 - DNA, 25 bp, probe
tcaatgtacatgccaacataaatat

SEQ ID NO: 286056 - DNA, 25 bp, probe
tcaagtgcctgctacacatacaaca

SEQ ID NO: 286057 - DNA, 25 bp, probe
tcaaggactcagaactgaaggcaat

SEQ ID NO: 286058 - DNA, 25 bp, probe
tcaaggtcaaagactaagtgccttt

SEQ ID NO: 286059 - DNA, 25 bp, probe
tcaatagtcaaaatgtactttctaa

SEQ ID NO: 286060 - DNA, 25 bp, probe
taataggctaattgtactgctctta

SEQ ID NO: 286061 - DNA, 25 bp, probe
tcaataggaatcattcttctcttgc

SEQ ID NO: 286062 - DNA, 25 bp, probe
taacaggcaataaactttcttcggt

SEQ ID NO: 286063 - DNA, 25 bp, probe
taaggtgaagattcttttcttaggt

SEQ ID NO: 286064 - DNA, 25 bp, probe
taagctgtacaatcgtttcatcatt

SEQ ID NO: 286065 - DNA, 25 bp, probe
taagttacattatcttttgattcat

SEQ ID NO: 286066 - DNA, 25 bp, probe
taatgtttcatgaccacccattgat

SEQ ID NO: 286067 - DNA, 25 bp, probe
taatgtttcatgaccacccattgat

SEQ ID NO: 286068 - DNA, 25 bp, probe
taatcttcaagttaccatattttcc

SEQ ID NO: 286069 - DNA, 25 bp, probe
taatcttcaaccttactagtttata

SEQ ID NO: 286070 - DNA, 25 bp, probe
taatgctaaagtatactagggtttt

SEQ ID NO: 286071 - DNA, 25 bp, probe
taatgctaaagtatactagggtttt

SEQ ID NO: 286072 - DNA, 25 bp, probe
taagtgagaaaaaactagggctgac

SEQ ID NO: 286073 - DNA, 25 bp, probe
taagtagaagaaagccatggtaaac

SEQ ID NO: 286074 - DNA, 25 bp, probe
taagtcaaagataagccccaaaagt

SEQ ID NO: 286075 - DNA, 25 bp, probe
tcaagtctgacgatgacacctccaa

SEQ ID NO: 286076 - DNA, 25 bp, probe
taagcctaagagaagacagtcccag

SEQ ID NO: 286077 - DNA, 25 bp, probe
taacctaaaataacagtctagttat

SEQ ID NO: 286078 - DNA, 25 bp, probe
taactcaaatccaccaaatactttt

SEQ ID NO: 286079 - DNA, 25 bp, probe
tatactgaacccatccaaacctgaa

SEQ ID NO: 286080 - DNA, 25 bp, probe
taaggaagccacacacataacccac

SEQ ID NO: 286081 - DNA, 25 bp, probe
taaggaagccacacacataacccac

SEQ ID NO: 286082 - DNA, 25 bp, probe
taattggtgtccaccaggtcctcac

SEQ ID NO: 286083 - DNA, 25 bp, probe
taatggtgtgtagacacaggccctc

SEQ ID NO: 286084 - DNA, 25 bp, probe
taaggtgtgtactcagggcattctg

SEQ ID NO: 286085 - DNA, 25 bp, probe
taaggttgctagtacagcgtttgct

SEQ ID NO: 286086 - DNA, 25 bp, probe
taaggtgttctagagccatttgcat

SEQ ID NO: 286087 - DNA, 25 bp, probe
taagttatcccaaagccgtgtgttt

SEQ ID NO: 286088 - DNA, 25 bp, probe
taaatcctacctagagacctttgtt

SEQ ID NO: 286089 - DNA, 25 bp, probe
taatcacactgaatgttagaccttt

SEQ ID NO: 286090 - DNA, 25 bp, probe
taatgatgcacatcaggtcaccctc

SEQ ID NO: 286091 - DNA, 25 bp, probe
taatcatgccaatggcctcacgttg

SEQ ID NO: 286092 - DNA, 25 bp, probe
taagtgccaatgggcccacctttta

SEQ ID NO: 286093 - DNA, 25 bp, probe
taatgtgtgcaaaagcccaaaggtt

SEQ ID NO: 286094 - DNA, 25 bp, probe
taaggtaaacatctgaaagcacatt

SEQ ID NO: 286095 - DNA, 25 bp, probe
taaggtgaagaatttcacacaacat

SEQ ID NO: 286096 - DNA, 25 bp, probe
taagggaaaatgaagtcagcacact

SEQ ID NO: 286097 - DNA, 25 bp, probe
taatggcgatcatctttgccaccac

SEQ ID NO: 286098 - DNA, 25 bp, probe
tcaaggctgctgtctttatcagcac

SEQ ID NO: 286099 - DNA, 25 bp, probe
tcaaggcctgctgtttaatcacaga

SEQ ID NO: 286100 - DNA, 25 bp, probe
tcaaggcgctgcacgttgactcagc

SEQ ID NO: 286101 - DNA, 25 bp, probe
tcaaggcgctgcacgttgactcagc

SEQ ID NO: 286102 - DNA, 25 bp, probe
tcaaggatgctcacatcctgcccac

SEQ ID NO: 286103 - DNA, 25 bp, probe
tcaaggatgtgctgattccccatga

SEQ ID NO: 286104 - DNA, 25 bp, probe
tcaaggtgatcgtattcttccagtg

SEQ ID NO: 286105 - DNA, 25 bp, probe
tcaagggtgcagttatttccagcaa

SEQ ID NO: 286106 - DNA, 25 bp, probe
tcaaggagaggcagattcaccagaa

SEQ ID NO: 286107 - DNA, 25 bp, probe
taagggagctgcaggttcttcatga

SEQ ID NO: 286108 - DNA, 25 bp, probe
taaggggctttgcttttcaaaccag

SEQ ID NO: 286109 - DNA, 25 bp, probe
taatgaggcctacgggtaccaaatc

SEQ ID NO: 286110 - DNA, 25 bp, probe
taatggacctccgtggccaaaaagt

SEQ ID NO: 286111 - DNA, 25 bp, probe
tcaaggacacccaggccatgaagga

SEQ ID NO: 286112 - DNA, 25 bp, probe
tcaaggaactccaagggccacagga

SEQ ID NO: 286113 - DNA, 25 bp, probe
tcaaggaacttcagagcatgtgctc

SEQ ID NO: 286114 - DNA, 25 bp, probe
tcaaggaacttcagagcatgtgctc

SEQ ID NO: 286115 - DNA, 25 bp, probe
taatgtggaattgaagtctgcagcc

SEQ ID NO: 286116 - DNA, 25 bp, probe
taatgtggaattgaagtctgcagcc

SEQ ID NO: 286117 - DNA, 25 bp, probe
taatggacaagtcaagccgcacacg

SEQ ID NO: 286118 - DNA, 25 bp, probe
taatggacaagtcaagccgcacacg

SEQ ID NO: 286119 - DNA, 25 bp, probe
taatggacaagtcaagccgcacacg

SEQ ID NO: 286120 - DNA, 25 bp, probe
taattaccatatctagagcagcact

SEQ ID NO: 286121 - DNA, 25 bp, probe
taattatcctatgccaaggacttga

SEQ ID NO: 286122 - DNA, 25 bp, probe
tcaatgaacctttcctagggctgtg

SEQ ID NO: 286123 - DNA, 25 bp, probe
taagcccctcttgaaggtgtgttct

SEQ ID NO: 286124 - DNA, 25 bp, probe
taaccctctgctttacacagttgca

SEQ ID NO: 286125 - DNA, 25 bp, probe
tcaatcccaacctgcagcaaggtga

SEQ ID NO: 286126 - DNA, 25 bp, probe
tcaatgccaaggccagtcagacggg

SEQ ID NO: 286127 - DNA, 25 bp, probe
taatgctcaaagctgtgcagcatca

SEQ ID NO: 286128 - DNA, 25 bp, probe
tagatggaacagcatgtggtgaaat

SEQ ID NO: 286129 - DNA, 25 bp, probe
tcaatgagtttgcaggcgtgaatga

SEQ ID NO: 286130 - DNA, 25 bp, probe
tcaattgttatgcaccagagattaa

SEQ ID NO: 286131 - DNA, 25 bp, probe
taatgttatgctcatgccaactgga

SEQ ID NO: 286132 - DNA, 25 bp, probe
taatcttcatgcagagatattcagg

SEQ ID NO: 286133 - DNA, 25 bp, probe
taacttcatgtgagctattggagtt

SEQ ID NO: 286134 - DNA, 25 bp, probe
taattcttgtgacttttggacagta

SEQ ID NO: 286135 - DNA, 25 bp, probe
tacatccttgtagccttgaagttaa

SEQ ID NO: 286136 - DNA, 25 bp, probe
taatcgttgtaaactaacagcttaa

SEQ ID NO: 286137 - DNA, 25 bp, probe
taattgtcactgtaaataacattta

SEQ ID NO: 286138 - DNA, 25 bp, probe
taatagtcattccaaatatgagatg

SEQ ID NO: 286139 - DNA, 25 bp, probe
tcaatatgtacagaattcatggatg

SEQ ID NO: 286140 - DNA, 25 bp, probe
taatcgataagtctcagctggatgc

SEQ ID NO: 286141 - DNA, 25 bp, probe
taataattggtgggcttgctgtgcc

SEQ ID NO: 286142 - DNA, 25 bp, probe
taataactggacttccagctgtgga

SEQ ID NO: 286143 - DNA, 25 bp, probe
taatcaagtaactcaaatgtgacaa

SEQ ID NO: 286144 - DNA, 25 bp, probe
taatcaagctgatcttaatgtatat

SEQ ID NO: 286145 - DNA, 25 bp, probe
tcaatcagagcgtcctgtgcggtga

SEQ ID NO: 286146 - DNA, 25 bp, probe
tcaatcagagcgtcctgtgcggtga

SEQ ID NO: 286147 - DNA, 25 bp, probe
tcaatcagagcgtcctgtgcactga

SEQ ID NO: 286148 - DNA, 25 bp, probe
taatctagtcccttgcactgggtca

SEQ ID NO: 286149 - DNA, 25 bp, probe
taatccatgttcaattcaaggttat

SEQ ID NO: 286150 - DNA, 25 bp, probe
taatcttttctttcaaaggacatat

SEQ ID NO: 286151 - DNA, 25 bp, probe
tacaagttactataaaggacacaaa

SEQ ID NO: 286152 - DNA, 25 bp, probe
tacaagttactataaaggacacaaa

SEQ ID NO: 286153 - DNA, 25 bp, probe
taccgttactctgatgaattgaatg

SEQ ID NO: 286154 - DNA, 25 bp, probe
taactggtacttgaaacatacagta

SEQ ID NO: 286155 - DNA, 25 bp, probe
taagggggccttggaatctatagta

SEQ ID NO: 286156 - DNA, 25 bp, probe
taagggcttgcctggattctacata

SEQ ID NO: 286157 - DNA, 25 bp, probe
taagggcgatgcctgggtttacaaa

SEQ ID NO: 286158 - DNA, 25 bp, probe
taaagggggtggcttggtcacaaca

SEQ ID NO: 286159 - DNA, 25 bp, probe
taaaggggcaggagaatggacaaca

SEQ ID NO: 286160 - DNA, 25 bp, probe
taatgacgcggctcaaaaggaaacc

SEQ ID NO: 286161 - DNA, 25 bp, probe
tacaatccggcagaaaggggatgaa

SEQ ID NO: 286162 - DNA, 25 bp, probe
taacttcgaagccatagggtggaga

SEQ ID NO: 286163 - DNA, 25 bp, probe
taactagcataccccgaagtggaga

SEQ ID NO: 286164 - DNA, 25 bp, probe
taactcggtccagcgaaagggcttc

SEQ ID NO: 286165 - DNA, 25 bp, probe
taagcagctggtttccagaagaggg

SEQ ID NO: 286166 - DNA, 25 bp, probe
taagtctgagactctaaggaggtga

SEQ ID NO: 286167 - DNA, 25 bp, probe
taagtctgagactctaaggaggtga

SEQ ID NO: 286168 - DNA, 25 bp, probe
taagaaggaccccaagcagaggctt

SEQ ID NO: 286169 - DNA, 25 bp, probe
taagaaggaccccaagcagaggctt

SEQ ID NO: 286170 - DNA, 25 bp, probe
taaccaaacaaccagaagaagtatt

SEQ ID NO: 286171 - DNA, 25 bp, probe
taacctcaaaactgtatataaatct

SEQ ID NO: 286172 - DNA, 25 bp, probe
taaagtgaaacccgtattagcaagt

SEQ ID NO: 286173 - DNA, 25 bp, probe
tacagtgtgaaagctcgccagttga

SEQ ID NO: 286174 - DNA, 25 bp, probe
tacaagtgggaggatcgccccgact

SEQ ID NO: 286175 - DNA, 25 bp, probe
taatagatgtggtgactctcccggt

SEQ ID NO: 286176 - DNA, 25 bp, probe
taagggagagggaccctgccggtgt

SEQ ID NO: 286177 - DNA, 25 bp, probe
taaggaagagtgccaccccttgagg

SEQ ID NO: 286178 - DNA, 25 bp, probe
taaggaaggattacggccaggagat

SEQ ID NO: 286179 - DNA, 25 bp, probe
taaggaagccttataccagtgcagt

SEQ ID NO: 286180 - DNA, 25 bp, probe
taagtgaacactttttccccattga

SEQ ID NO: 286181 - DNA, 25 bp, probe
taagtgaacactttttccccattga

SEQ ID NO: 286182 - DNA, 25 bp, probe
taaagaagcacgttgatttcaccaa

SEQ ID NO: 286183 - DNA, 25 bp, probe
taaccggatcgacattccaccatat

SEQ ID NO: 286184 - DNA, 25 bp, probe
taaccgtgaaagcaaaagcctttgg

SEQ ID NO: 286185 - DNA, 25 bp, probe
taagctctataatgcccaagacccc

SEQ ID NO: 286186 - DNA, 25 bp, probe
tatataattaaagccaaaacctcta

SEQ ID NO: 286187 - DNA, 25 bp, probe
tatataattaaagccaaaacctcta

SEQ ID NO: 286188 - DNA, 25 bp, probe
taattaatcaagacccctaacccat

SEQ ID NO: 286189 - DNA, 25 bp, probe
taattaaagctacctcctaaactat

SEQ ID NO: 286190 - DNA, 25 bp, probe
taaactgcaggtaggcttctaagcc

SEQ ID NO: 286191 - DNA, 25 bp, probe
tcaattctgggtacccatgctaacc

SEQ ID NO: 286192 - DNA, 25 bp, probe
taataggctgggagactgaagactc

SEQ ID NO: 286193 - DNA, 25 bp, probe
tcaataccttggggacgaagcgtat

SEQ ID NO: 286194 - DNA, 25 bp, probe
tcaataccctggacaagctcatccg

SEQ ID NO: 286195 - DNA, 25 bp, probe
tcaatacccgaaatgatgtactgga

SEQ ID NO: 286196 - DNA, 25 bp, probe
tcaataccggagatcatgcaagctg

SEQ ID NO: 286197 - DNA, 25 bp, probe
taatgacgtggactttagcatgcag

SEQ ID NO: 286198 - DNA, 25 bp, probe
tcaatgcacatcttggtattgagca

SEQ ID NO: 286199 - DNA, 25 bp, probe
tcaatgcgctgatgtgatctatgaa

SEQ ID NO: 286200 - DNA, 25 bp, probe
tcaatgcagccaagatcatccgcca

SEQ ID NO: 286201 - DNA, 25 bp, probe
tcaatgccatcaactatgccctggg

SEQ ID NO: 286202 - DNA, 25 bp, probe
tcaatgccagtaattgcaccattaa

SEQ ID NO: 286203 - DNA, 25 bp, probe
taatgacaatgaagtgacactttga

SEQ ID NO: 286204 - DNA, 25 bp, probe
taataactgatgagatacatttgat

SEQ ID NO: 286205 - DNA, 25 bp, probe
tacactgacttgagaccagttgaat

SEQ ID NO: 286206 - DNA, 25 bp, probe
taattccgtgatggaccctctcata

SEQ ID NO: 286207 - DNA, 25 bp, probe
taataccagtgtgatgtcaggccat

SEQ ID NO: 286208 - DNA, 25 bp, probe
taatagccctagccattggtgcaca

SEQ ID NO: 286209 - DNA, 25 bp, probe
taatatccctacatgtattgcacat

SEQ ID NO: 286210 - DNA, 25 bp, probe
taattccgatactagtttgctttgc

SEQ ID NO: 286211 - DNA, 25 bp, probe
taatctcaggaagagccttcttatt

SEQ ID NO: 286212 - DNA, 25 bp, probe
taagccgggatctaccatacccatt

SEQ ID NO: 286213 - DNA, 25 bp, probe
taagccgggatctaccatacccatt

SEQ ID NO: 286214 - DNA, 25 bp, probe
taagggtggtttggcaacacctcct

SEQ ID NO: 286215 - DNA, 25 bp, probe
taagggtggtttggcaacacctcct

SEQ ID NO: 286216 - DNA, 25 bp, probe
taaggggttttgtatccatcctgcc

SEQ ID NO: 286217 - DNA, 25 bp, probe
taagggactttggaattctgcttct

SEQ ID NO: 286218 - DNA, 25 bp, probe
taaggattttatgagttcttgtttt

SEQ ID NO: 286219 - DNA, 25 bp, probe
tacaccttaatgaaagttctccctt

SEQ ID NO: 286220 - DNA, 25 bp, probe
tacaccttaatgaaagttctccctt

SEQ ID NO: 286221 - DNA, 25 bp, probe
taatccttgttagagttatccctgc

SEQ ID NO: 286222 - DNA, 25 bp, probe
taaactacttaaagattataccaag

SEQ ID NO: 286223 - DNA, 25 bp, probe
taagccaactaatagactctcagcc

SEQ ID NO: 286224 - DNA, 25 bp, probe
taattcaactgagtaagtctgaacc

SEQ ID NO: 286225 - DNA, 25 bp, probe
taatgttgactgttaattcttaagc

SEQ ID NO: 286226 - DNA, 25 bp, probe
taagacatatctctaattccatcca

SEQ ID NO: 286227 - DNA, 25 bp, probe
tcaataaactcactttgcccattcc

SEQ ID NO: 286228 - DNA, 25 bp, probe
taatgcaaagctctttacctcttgc

SEQ ID NO: 286229 - DNA, 25 bp, probe
taacaatatgggtattacctttgtc

SEQ ID NO: 286230 - DNA, 25 bp, probe
taatcatttgggagatggctcgtcg

SEQ ID NO: 286231 - DNA, 25 bp, probe
taaattcaattcactggccgtcgtt

SEQ ID NO: 286232 - DNA, 25 bp, probe
taaaccattatcactaccaacaatt

SEQ ID NO: 286233 - DNA, 25 bp, probe
tcaattccaaactcttaaccagttc

SEQ ID NO: 286234 - DNA, 25 bp, probe
taatgcatccaataactcagaacca

SEQ ID NO: 286235 - DNA, 25 bp, probe
taatgcatcctatatccagtaagta

SEQ ID NO: 286236 - DNA, 25 bp, probe
taaccactctaatcagtaaacagga

SEQ ID NO: 286237 - DNA, 25 bp, probe
tataccctcattgccaaaaacccac

SEQ ID NO: 286238 - DNA, 25 bp, probe
taactccgtttccaaatacattcca

SEQ ID NO: 286239 - DNA, 25 bp, probe
taaccacgttattaaaacttgatca

SEQ ID NO: 286240 - DNA, 25 bp, probe
taaccttctttttgcaaatgtcttc

SEQ ID NO: 286241 - DNA, 25 bp, probe
taatccctctattttaagatttctg

SEQ ID NO: 286242 - DNA, 25 bp, probe
taattcctgtatgttatccactaca

SEQ ID NO: 286243 - DNA, 25 bp, probe
taagttctgaatgttaaactactct

SEQ ID NO: 286244 - DNA, 25 bp, probe
tacatttgatagtttttcacccctt

SEQ ID NO: 286245 - DNA, 25 bp, probe
taatttgtagccatcttttcccatg

SEQ ID NO: 286246 - DNA, 25 bp, probe
taatttgtagccatcttttcccatg

SEQ ID NO: 286247 - DNA, 25 bp, probe
taattttgtgccattctttaacata

SEQ ID NO: 286248 - DNA, 25 bp, probe
taatctgttttgagtctttacaaaa

SEQ ID NO: 286249 - DNA, 25 bp, probe
taatctgtgttaatttcattttgat

SEQ ID NO: 286250 - DNA, 25 bp, probe
taatgttttatactgtttactgaaa

SEQ ID NO: 286251 - DNA, 25 bp, probe
taatgttttatactgtttactgaaa

SEQ ID NO: 286252 - DNA, 25 bp, probe
taattcctctgattctgttttctgg

SEQ ID NO: 286253 - DNA, 25 bp, probe
taattgcccgaaacacttctcggcc

SEQ ID NO: 286254 - DNA, 25 bp, probe
taattcaacaaacactgtcatggac

SEQ ID NO: 286255 - DNA, 25 bp, probe
taatatcaaccttgccctattgaga

SEQ ID NO: 286256 - DNA, 25 bp, probe
taatatatcccattcaggtttcaga

SEQ ID NO: 286257 - DNA, 25 bp, probe
taagaagcccagacgagtagtgtga

SEQ ID NO: 286258 - DNA, 25 bp, probe
taaacgatgccgaccggcgatgcgg

SEQ ID NO: 286259 - DNA, 25 bp, probe
taatcatgctaggggccgggtgcag

SEQ ID NO: 286260 - DNA, 25 bp, probe
taacgcttgggtgcgtgggagggcg

SEQ ID NO: 286261 - DNA, 25 bp, probe
taaggtggggtgaggcggatcccgc

SEQ ID NO: 286262 - DNA, 25 bp, probe
taacttggctggtggtgtggacccc

SEQ ID NO: 286263 - DNA, 25 bp, probe
taattgctggctggtgggttgcaag

SEQ ID NO: 286264 - DNA, 25 bp, probe
taatgctttctggtgggtaaaattc

SEQ ID NO: 286265 - DNA, 25 bp, probe
taggctttgtgggccctagtagtct

SEQ ID NO: 286266 - DNA, 25 bp, probe
taagctgagtgtgaccccagaagcc

SEQ ID NO: 286267 - DNA, 25 bp, probe
taagtgcaagcgaagctctcaagca

SEQ ID NO: 286268 - DNA, 25 bp, probe
taagatgcgattacgcttcagagat

SEQ ID NO: 286269 - DNA, 25 bp, probe
taatgatggtgtacctggtgattgt

SEQ ID NO: 286270 - DNA, 25 bp, probe
ttcaggttccacatggtatagttac

SEQ ID NO: 286271 - DNA, 25 bp, probe
ttaagttctgaatgttaaactactc

SEQ ID NO: 286272 - DNA, 25 bp, probe
taagtttccaagcagtaaactacct

SEQ ID NO: 286273 - DNA, 25 bp, probe
taaacgtccacagagtataaataac

SEQ ID NO: 286274 - DNA, 25 bp, probe
taagaagtaccggggattcaccatc

SEQ ID NO: 286275 - DNA, 25 bp, probe
ttagtagagacggggtttcaccatg

SEQ ID NO: 286276 - DNA, 25 bp, probe
taagtaagaagtagtgtttccatgc

SEQ ID NO: 286277 - DNA, 25 bp, probe
taagtcaaacatttggtttccagaa

SEQ ID NO: 286278 - DNA, 25 bp, probe
taagtcaggaaatggggtatgcagg

SEQ ID NO: 286279 - DNA, 25 bp, probe
taggaagaagaatggggtacaagga

SEQ ID NO: 286280 - DNA, 25 bp, probe
taaaagaagaataggcggggcacgg

SEQ ID NO: 286281 - DNA, 25 bp, probe
taaccaagaagacggctgcggagcc

SEQ ID NO: 286282 - DNA, 25 bp, probe
taaccaagaagacggctgcggagcc

SEQ ID NO: 286283 - DNA, 25 bp, probe
taagcgaaagagccggcctgtgagt

SEQ ID NO: 286284 - DNA, 25 bp, probe
taagaggaaagcaagggcgcggttg

SEQ ID NO: 286285 - DNA, 25 bp, probe
taaagtggaagcaggttggtgtaga

SEQ ID NO: 286286 - DNA, 25 bp, probe
taatggtaggaggggcttgggtggg

SEQ ID NO: 286287 - DNA, 25 bp, probe
taatgttatgcacgttggcttgagg

SEQ ID NO: 286288 - DNA, 25 bp, probe
taatgttgacggctttgtgattgat

SEQ ID NO: 286289 - DNA, 25 bp, probe
taatttgtggtgatttggatctgtg

SEQ ID NO: 286290 - DNA, 25 bp, probe
taagtcactgggttttggtatggtt

SEQ ID NO: 286291 - DNA, 25 bp, probe
taatccgctggtgaccggttacttg

SEQ ID NO: 286292 - DNA, 25 bp, probe
taatccgctggtgaccggttacttg

SEQ ID NO: 286293 - DNA, 25 bp, probe
taaccctgagttgtgcggttctctg

SEQ ID NO: 286294 - DNA, 25 bp, probe
tacacttcaactacggggatgttcc

SEQ ID NO: 286295 - DNA, 25 bp, probe
taacttactcacacggacaggttga

SEQ ID NO: 286296 - DNA, 25 bp, probe
taacttactcacacggacaggttga

SEQ ID NO: 286297 - DNA, 25 bp, probe
tagactaacgccactgatggcggcc

SEQ ID NO: 286298 - DNA, 25 bp, probe
taacctcacggcccatgattacgtc

SEQ ID NO: 286299 - DNA, 25 bp, probe
taacctcacggcccatgattacgtc

SEQ ID NO: 286300 - DNA, 25 bp, probe
taacttcctggcttctaaacatcgt

SEQ ID NO: 286301 - DNA, 25 bp, probe
taaccatcaccctaataatatacgt

SEQ ID NO: 286302 - DNA, 25 bp, probe
taagcctcacctatttaatccaatg

SEQ ID NO: 286303 - DNA, 25 bp, probe
taagctcccacaatttcttacgggg

SEQ ID NO: 286304 - DNA, 25 bp, probe
taaccacccaatcattctaaagcag

SEQ ID NO: 286305 - DNA, 25 bp, probe
taaggctcccaacaatgctatacag

SEQ ID NO: 286306 - DNA, 25 bp, probe
taaggctcccaacaatgctatacag

SEQ ID NO: 286307 - DNA, 25 bp, probe
taatggccccaatgatactcctgaa

SEQ ID NO: 286308 - DNA, 25 bp, probe
taacgccactaatatacatccctaa

SEQ ID NO: 286309 - DNA, 25 bp, probe
taagtgccctaatatataccgtgta

SEQ ID NO: 286310 - DNA, 25 bp, probe
taattccctcaataacaccaatgtt

SEQ ID NO: 286311 - DNA, 25 bp, probe
taattccctcaataacaccaatgtt

SEQ ID NO: 286312 - DNA, 25 bp, probe
taattcctccagtgacctgtcaagg

SEQ ID NO: 286313 - DNA, 25 bp, probe
taattcctccagtgacctgtcaagg

SEQ ID NO: 286314 - DNA, 25 bp, probe
taattcctccagtgacctgtcaagg

SEQ ID NO: 286315 - DNA, 25 bp, probe
taatctccttcttgctgaccaaaag

SEQ ID NO: 286316 - DNA, 25 bp, probe
taatctccttcttgctgaccaaaag

SEQ ID NO: 286317 - DNA, 25 bp, probe
taactcttcattttaggaacaaact

SEQ ID NO: 286318 - DNA, 25 bp, probe
taaacttttacttgacaacaaggat

SEQ ID NO: 286319 - DNA, 25 bp, probe
taatacattactgcagagaaacacg

SEQ ID NO: 286320 - DNA, 25 bp, probe
taatatcatttgtactgaagacccc

SEQ ID NO: 286321 - DNA, 25 bp, probe
taaaagatatgtactgcaggcccag

SEQ ID NO: 286322 - DNA, 25 bp, probe
taatctgacaggcagccgtgctcca

SEQ ID NO: 286323 - DNA, 25 bp, probe
taatctgacaggcagccgtgctcca

SEQ ID NO: 286324 - DNA, 25 bp, probe
taatcagtatgggagccaatgtcca

SEQ ID NO: 286325 - DNA, 25 bp, probe
taatcagtatgggagccaatgtcca

SEQ ID NO: 286326 - DNA, 25 bp, probe
taatcagctcaaaagctcacatctc

SEQ ID NO: 286327 - DNA, 25 bp, probe
taacgctcaacagctacatccatac

SEQ ID NO: 286328 - DNA, 25 bp, probe
taatcctaagattttgccctacaat

SEQ ID NO: 286329 - DNA, 25 bp, probe
taatcctaagaacttctccaacgac

SEQ ID NO: 286330 - DNA, 25 bp, probe
taatcctgcaagtgctttccaggga

SEQ ID NO: 286331 - DNA, 25 bp, probe
taattctcagagttgctttgcacat

SEQ ID NO: 286332 - DNA, 25 bp, probe
taatcacgcgatgttgactgcacag

SEQ ID NO: 286333 - DNA, 25 bp, probe
taacctggacgtgagctgtcagagc

SEQ ID NO: 286334 - DNA, 25 bp, probe
taagaccgtggaggcagctgtagca

SEQ ID NO: 286335 - DNA, 25 bp, probe
taagaccgatagcaggtgaactcga

SEQ ID NO: 286336 - DNA, 25 bp, probe
taatcccagccagaggccaatgctc

SEQ ID NO: 286337 - DNA, 25 bp, probe
taatcccagtgctttgggaagccga

SEQ ID NO: 286338 - DNA, 25 bp, probe
taatcccagcactttgggaggccga

SEQ ID NO: 286339 - DNA, 25 bp, probe
taatcccagctactcgggaggctga

SEQ ID NO: 286340 - DNA, 25 bp, probe
taaggcatcattttcgagggtctaa

SEQ ID NO: 286341 - DNA, 25 bp, probe
taaggtctgtaactatggacttacc

SEQ ID NO: 286342 - DNA, 25 bp, probe
tacttcctgtaatgaggacgttcaa

SEQ ID NO: 286343 - DNA, 25 bp, probe
taaccgtgctaatgggaagagtaca

SEQ ID NO: 286344 - DNA, 25 bp, probe
taaccgtgctaatgggaagagtaca

SEQ ID NO: 286345 - DNA, 25 bp, probe
taatcacctgatcataggaaagaat

SEQ ID NO: 286346 - DNA, 25 bp, probe
taatctttgtgctatatggtatgaa

SEQ ID NO: 286347 - DNA, 25 bp, probe
taattcttctcctttgtcaaatggt

SEQ ID NO: 286348 - DNA, 25 bp, probe
taattcttctcctttgtcaaatggt

SEQ ID NO: 286349 - DNA, 25 bp, probe
taatgtcttcagcctcataataaag

SEQ ID NO: 286350 - DNA, 25 bp, probe
taatgtctcatctctatagtacagg

SEQ ID NO: 286351 - DNA, 25 bp, probe
taagccatgcatgtctaagtacgca

SEQ ID NO: 286352 - DNA, 25 bp, probe
taagccatgcatgtctaagtacgca

SEQ ID NO: 286353 - DNA, 25 bp, probe
taatgctcagaacctaaccactacc

SEQ ID NO: 286354 - DNA, 25 bp, probe
taatgctcagaacctaaccactacc

SEQ ID NO: 286355 - DNA, 25 bp, probe
taatttgtaccttaagcatttccca

SEQ ID NO: 286356 - DNA, 25 bp, probe
taatgtcatgttgcttgtcgctttc

SEQ ID NO: 286357 - DNA, 25 bp, probe
taatggcacctcatttggctttgtg

SEQ ID NO: 286358 - DNA, 25 bp, probe
taatggcacctcatttggctttgtg

SEQ ID NO: 286359 - DNA, 25 bp, probe
taagtgctacataaattggcctggt

SEQ ID NO: 286360 - DNA, 25 bp, probe
taagttgagtgaacatcggccatga

SEQ ID NO: 286361 - DNA, 25 bp, probe
taaggggtcatcaatgctggcaaga

SEQ ID NO: 286362 - DNA, 25 bp, probe
taaggagggcaaactggcagtggtg

SEQ ID NO: 286363 - DNA, 25 bp, probe
taaggagggcaaactggcagtggtg

SEQ ID NO: 286364 - DNA, 25 bp, probe
taagtgagggtctgcggaggcttgc

SEQ ID NO: 286365 - DNA, 25 bp, probe
tagagtagagtggagggagggtggc

SEQ ID NO: 286366 - DNA, 25 bp, probe
taagtagggccagggcaccgtattc

SEQ ID NO: 286367 - DNA, 25 bp, probe
taaatgaccgaagagcccgattccc

SEQ ID NO: 286368 - DNA, 25 bp, probe
taaatacattaagacaacacatttg

SEQ ID NO: 286369 - DNA, 25 bp, probe
ttactataaaagcatgccaaatctt

SEQ ID NO: 286370 - DNA, 25 bp, probe
ttcaaattaaagcacctttgttagt

SEQ ID NO: 286371 - DNA, 25 bp, probe
taaacttgaattgacacgtggtgta

SEQ ID NO: 286372 - DNA, 25 bp, probe
taaaagtacaatgagccttactgta

SEQ ID NO: 286373 - DNA, 25 bp, probe
tacactagtccataagctttaccca

SEQ ID NO: 286374 - DNA, 25 bp, probe
taagtactccagcagagtcccacag

SEQ ID NO: 286375 - DNA, 25 bp, probe
taagtactccagcagagtcccacag

SEQ ID NO: 286376 - DNA, 25 bp, probe
taagtgacttgcctgaggccatccc

SEQ ID NO: 286377 - DNA, 25 bp, probe
taagtgacatcaactcagagcctcc

SEQ ID NO: 286378 - DNA, 25 bp, probe
taatgtcactggactcggcctaagg

SEQ ID NO: 286379 - DNA, 25 bp, probe
taagtcaaggctgggtgttgataga

SEQ ID NO: 286380 - DNA, 25 bp, probe
taaaaggcctcggattctgtcacag

SEQ ID NO: 286381 - DNA, 25 bp, probe
taatccagaccaacgattttctcag

SEQ ID NO: 286382 - DNA, 25 bp, probe
taatcctgacattagctgacttgct

SEQ ID NO: 286383 - DNA, 25 bp, probe
taatcctgacattagctgacttgct

SEQ ID NO: 286384 - DNA, 25 bp, probe
taatcctatatgtaatgatcattat

SEQ ID NO: 286385 - DNA, 25 bp, probe
taatggcttgagcacagagctgtag

SEQ ID NO: 286386 - DNA, 25 bp, probe
taatcagcttgcaaggagataggag

SEQ ID NO: 286387 - DNA, 25 bp, probe
taatagcaggcaagaggatccaggt

SEQ ID NO: 286388 - DNA, 25 bp, probe
taatagcgtgctggactattcagga

SEQ ID NO: 286389 - DNA, 25 bp, probe
taatagcgtgctggactattcagga

SEQ ID NO: 286390 - DNA, 25 bp, probe
taatgagccatgggctctgcttccg

SEQ ID NO: 286391 - DNA, 25 bp, probe
taagatgctcagagtcctcaattgt

SEQ ID NO: 286392 - DNA, 25 bp, probe
taagatgctcagagtcctcaattgt

SEQ ID NO: 286393 - DNA, 25 bp, probe
tacacatctagcagtcagttcttgt

SEQ ID NO: 286394 - DNA, 25 bp, probe
tacacatctagcagtcagttcttgt

SEQ ID NO: 286395 - DNA, 25 bp, probe
taacctcatcgggattgtctttttt

SEQ ID NO: 286396 - DNA, 25 bp, probe
taaggccacggcttgtgtctgattc

SEQ ID NO: 286397 - DNA, 25 bp, probe
taagtgccacttctgtgtctttcta

SEQ ID NO: 286398 - DNA, 25 bp, probe
taataaactggttctgctctcttct

SEQ ID NO: 286399 - DNA, 25 bp, probe
taataaactggttctgctctcttct

SEQ ID NO: 286400 - DNA, 25 bp, probe
taataaactggttctgctctcttct

SEQ ID NO: 286401 - DNA, 25 bp, probe
taataatcctggccaactctcgtag

SEQ ID NO: 286402 - DNA, 25 bp, probe
taataatcctggccaactctcgtag

SEQ ID NO: 286403 - DNA, 25 bp, probe
tataaaccatgtcgtttccgtggct

SEQ ID NO: 286404 - DNA, 25 bp, probe
taaggcagccttcttcacaggctga

SEQ ID NO: 286405 - DNA, 25 bp, probe
taaggcagcctcatagtcaatccca

SEQ ID NO: 286406 - DNA, 25 bp, probe
taagaagcttttccataaactcccg

SEQ ID NO: 286407 - DNA, 25 bp, probe
taagaagcttttccataaactcccg

SEQ ID NO: 286408 - DNA, 25 bp, probe
taaaactttcccaagacattttcag

SEQ ID NO: 286409 - DNA, 25 bp, probe
taaattatttgccctggagttttag

SEQ ID NO: 286410 - DNA, 25 bp, probe
taagattatttcagtggatttttaa

SEQ ID NO: 286411 - DNA, 25 bp, probe
taacttatttcaagggtgctgtgct

SEQ ID NO: 286412 - DNA, 25 bp, probe
taagtccttagctgcggtgctatat

SEQ ID NO: 286413 - DNA, 25 bp, probe
taataccttccttagggctcatcaa

SEQ ID NO: 286414 - DNA, 25 bp, probe
taatatatttccattgtgaccagca

SEQ ID NO: 286415 - DNA, 25 bp, probe
taataaatcccaatataatcccaaa

SEQ ID NO: 286416 - DNA, 25 bp, probe
taatcaagacccctaacccatagaa

SEQ ID NO: 286417 - DNA, 25 bp, probe
taatcaacaccgctttgccgataga

SEQ ID NO: 286418 - DNA, 25 bp, probe
taatcaacaccgctttgccgataga

SEQ ID NO: 286419 - DNA, 25 bp, probe
taacaactctcactttagtggatgt

SEQ ID NO: 286420 - DNA, 25 bp, probe
taatgagatctcctttaagctggga

SEQ ID NO: 286421 - DNA, 25 bp, probe
taatgagatctcctttaagctggga

SEQ ID NO: 286422 - DNA, 25 bp, probe
taatctgaccgttctattgtgtgga

SEQ ID NO: 286423 - DNA, 25 bp, probe
taatctgaccgttctattgtgtgga

SEQ ID NO: 286424 - DNA, 25 bp, probe
taatgtgatccaccattttctctgt

SEQ ID NO: 286425 - DNA, 25 bp, probe
tacgtaccacggattctctttaata

SEQ ID NO: 286426 - DNA, 25 bp, probe
ttagtacccaaatcgtcttatatta

SEQ ID NO: 286427 - DNA, 25 bp, probe
taagaaccctaatattgttaattat

SEQ ID NO: 286428 - DNA, 25 bp, probe
taatataccccaaattgtgtatata

SEQ ID NO: 286429 - DNA, 25 bp, probe
taaaactcttatcttgagtctaaaa

SEQ ID NO: 286430 - DNA, 25 bp, probe
taaaactcttatcttgagtctaaaa

SEQ ID NO: 286431 - DNA, 25 bp, probe
taaagcacctttgttagtaaacagt

SEQ ID NO: 286432 - DNA, 25 bp, probe
taaaaccattctgcttggttccaca

SEQ ID NO: 286433 - DNA, 25 bp, probe
taaaacgattttctgttgctgccat

SEQ ID NO: 286434 - DNA, 25 bp, probe
taatgaacttatttgtattttccca

SEQ ID NO: 286435 - DNA, 25 bp, probe
taaggagctctatttcttatttaac

SEQ ID NO: 286436 - DNA, 25 bp, probe
taatggatgctaacttatgtcaggt

SEQ ID NO: 286437 - DNA, 25 bp, probe
taaggatgtgagctttgtatttcca

SEQ ID NO: 286438 - DNA, 25 bp, probe
taatagagtggcctctttcgctctt

SEQ ID NO: 286439 - DNA, 25 bp, probe
taatagagtggcctctttcgctctt

SEQ ID NO: 286440 - DNA, 25 bp, probe
taatcagtggagctctggccttcat

SEQ ID NO: 286441 - DNA, 25 bp, probe
taagccaggagccgagatggaaatt

SEQ ID NO: 286442 - DNA, 25 bp, probe
taagcaagtacacagatgatacaga

SEQ ID NO: 286443 - DNA, 25 bp, probe
taagcaagtacacagatgatacaga

SEQ ID NO: 286444 - DNA, 25 bp, probe
taatctgagaatgccagtgtcacaa

SEQ ID NO: 286445 - DNA, 25 bp, probe
taatcagcaacattccagtcttgaa

SEQ ID NO: 286446 - DNA, 25 bp, probe
taatcagcaatattgcctgtgcttc

SEQ ID NO: 286447 - DNA, 25 bp, probe
taatgcaacaagtcctgaatccctt

SEQ ID NO: 286448 - DNA, 25 bp, probe
taatgcttcaagtcactaatcacct

SEQ ID NO: 286449 - DNA, 25 bp, probe
taatgggcaatgtcctcatcatcct

SEQ ID NO: 286450 - DNA, 25 bp, probe
tagcaggtccgcatcatcatcatgc

SEQ ID NO: 286451 - DNA, 25 bp, probe
tagcaggtccgcatcatcatcatgc

SEQ ID NO: 286452 - DNA, 25 bp, probe
taagctgggcgttgactcatgcgca

SEQ ID NO: 286453 - DNA, 25 bp, probe
taaggatggcagccttctcatggct

SEQ ID NO: 286454 - DNA, 25 bp, probe
taaggtggcattgtctcatggctct

SEQ ID NO: 286455 - DNA, 25 bp, probe
taaggtggcattgtctcatggctct

SEQ ID NO: 286456 - DNA, 25 bp, probe
taaggtggcattgtctcatggctct

SEQ ID NO: 286457 - DNA, 25 bp, probe
taagttgcgcttctttgctgtgatg

SEQ ID NO: 286458 - DNA, 25 bp, probe
taatggtagtcttccttctgatgtg

SEQ ID NO: 286459 - DNA, 25 bp, probe
taaggtagtaacactctggtacaga

SEQ ID NO: 286460 - DNA, 25 bp, probe
taaggtgttggaatccctgggcaaa

SEQ ID NO: 286461 - DNA, 25 bp, probe
taaccttgcggaaccagcttatgaa

SEQ ID NO: 286462 - DNA, 25 bp, probe
tacacctacgagtactacctaaact

SEQ ID NO: 286463 - DNA, 25 bp, probe
taaccaaggaattctacctgcagga

SEQ ID NO: 286464 - DNA, 25 bp, probe
taaagctagaaatgatccccagctg

SEQ ID NO: 286465 - DNA, 25 bp, probe
taactgcatagtaatagggcccgtg

SEQ ID NO: 286466 - DNA, 25 bp, probe
taactgcttctcctagacagggctg

SEQ ID NO: 286467 - DNA, 25 bp, probe
taactgcttctcctagacagggctg

SEQ ID NO: 286468 - DNA, 25 bp, probe
taacatctctttcaactggggattt

SEQ ID NO: 286469 - DNA, 25 bp, probe
taagcatttttctggggggatgtcc

SEQ ID NO: 286470 - DNA, 25 bp, probe
taatgccaattttcggagagggatg

SEQ ID NO: 286471 - DNA, 25 bp, probe
taatgccaattttcggagagggatg

SEQ ID NO: 286472 - DNA, 25 bp, probe
taatccacatttggtgttgcagatg

SEQ ID NO: 286473 - DNA, 25 bp, probe
taacagcctttggagtcgcaatgta

SEQ ID NO: 286474 - DNA, 25 bp, probe
taacgtcatgttggattcagaagga

SEQ ID NO: 286475 - DNA, 25 bp, probe
taagcttttaagcatcatgaagaac

SEQ ID NO: 286476 - DNA, 25 bp, probe
taatcttttgtagttaactgtactt

SEQ ID NO: 286477 - DNA, 25 bp, probe
taacttttcagggtctacctaactg

SEQ ID NO: 286478 - DNA, 25 bp, probe
taacttttcagggtctacctaactg

SEQ ID NO: 286479 - DNA, 25 bp, probe
taactctgtacgaggcttctctaac

SEQ ID NO: 286480 - DNA, 25 bp, probe
taacctgtgcaggggtattcctaat

SEQ ID NO: 286481 - DNA, 25 bp, probe
taagccttagttctttcatctagat

SEQ ID NO: 286482 - DNA, 25 bp, probe
taatcgctgaagatccatgtctcct

SEQ ID NO: 286483 - DNA, 25 bp, probe
taagtgctgacacatcattcccagc

SEQ ID NO: 286484 - DNA, 25 bp, probe
taagtgctgacacatcattcccagc

SEQ ID NO: 286485 - DNA, 25 bp, probe
taaggcatgtgactcatcaccaccc

SEQ ID NO: 286486 - DNA, 25 bp, probe
taatgctgcttctgcatcagcttcc

SEQ ID NO: 286487 - DNA, 25 bp, probe
taatctcttatactcgtgtgctctt

SEQ ID NO: 286488 - DNA, 25 bp, probe
taatctcttatactcgtgtgctctt

SEQ ID NO: 286489 - DNA, 25 bp, probe
taatccacttcactctgatgactca

SEQ ID NO: 286490 - DNA, 25 bp, probe
taatcttatttttgatgaacacata

SEQ ID NO: 286491 - DNA, 25 bp, probe
taatcttatttttgatgaacacata

SEQ ID NO: 286492 - DNA, 25 bp, probe
taatctttttcataatacatggcca

SEQ ID NO: 286493 - DNA, 25 bp, probe
taatctttttcataatacatggcca

SEQ ID NO: 286494 - DNA, 25 bp, probe
taacgtttgtagaagatactagttg

SEQ ID NO: 286495 - DNA, 25 bp, probe
taccgtccttgtcataactttgtgt

SEQ ID NO: 286496 - DNA, 25 bp, probe
taagcccactgttaatattctatta

SEQ ID NO: 286497 - DNA, 25 bp, probe
taagaaatccttgcatttttgtaac

SEQ ID NO: 286498 - DNA, 25 bp, probe
taagaaatccttgcatttttgtaac

SEQ ID NO: 286499 - DNA, 25 bp, probe
taaggacgccttgatgctttcttca

SEQ ID NO: 286500 - DNA, 25 bp, probe
taatgcatgatgcctcttccagttt

SEQ ID NO: 286501 - DNA, 25 bp, probe
taatgatagccatccagctgctttc

SEQ ID NO: 286502 - DNA, 25 bp, probe
taatgacacttgtccccaaatccga

SEQ ID NO: 286503 - DNA, 25 bp, probe
taatgacacttgtccccaaatccga

SEQ ID NO: 286504 - DNA, 25 bp, probe
taatgatcaatttacctgcatataa

SEQ ID NO: 286505 - DNA, 25 bp, probe
taatgccagtttagttgacatagaa

SEQ ID NO: 286506 - DNA, 25 bp, probe
taatcacaggttactttccagaaag

SEQ ID NO: 286507 - DNA, 25 bp, probe
taaacctgtttggttcagcaaacaa

SEQ ID NO: 286508 - DNA, 25 bp, probe
taaggcacttttttacacaaacagg

SEQ ID NO: 286509 - DNA, 25 bp, probe
taaggcacttttttacacaaacagg

SEQ ID NO: 286510 - DNA, 25 bp, probe
taaggactttaatatagcaacagac

SEQ ID NO: 286511 - DNA, 25 bp, probe
taaggactttaatatagcaacagac

SEQ ID NO: 286512 - DNA, 25 bp, probe
taagggacaccctaataaagcaatc

SEQ ID NO: 286513 - DNA, 25 bp, probe
taaggcacacctgctgagtaaaaca

SEQ ID NO: 286514 - DNA, 25 bp, probe
taagagacctacctctggtcaagaa

SEQ ID NO: 286515 - DNA, 25 bp, probe
taacgaagtatccttcagcctgaaa

SEQ ID NO: 286516 - DNA, 25 bp, probe
taactaattatccttacacacaaaa

SEQ ID NO: 286517 - DNA, 25 bp, probe
taactagtctaccagtgacctcagg

SEQ ID NO: 286518 - DNA, 25 bp, probe
taactatttccatgatgcacgccgg

SEQ ID NO: 286519 - DNA, 25 bp, probe
taactttgtctgtgagcacgctgcc

SEQ ID NO: 286520 - DNA, 25 bp, probe
taatgcttacggggacaagtacaaa

SEQ ID NO: 286521 - DNA, 25 bp, probe
taatgcttacggggacaagtacaaa

SEQ ID NO: 286522 - DNA, 25 bp, probe
ttacctagcagggaaaaatacacaa

SEQ ID NO: 286523 - DNA, 25 bp, probe
ttacctagcagggaaaaatacacaa

SEQ ID NO: 286524 - DNA, 25 bp, probe
ttaaattatgggtccaaaagccaag

SEQ ID NO: 286525 - DNA, 25 bp, probe
ttaaattatgggtccaaaagccaag

SEQ ID NO: 286526 - DNA, 25 bp, probe
taaaagatgtagcagccaaaaggaa

SEQ ID NO: 286527 - DNA, 25 bp, probe
taagaacataggcgctacaaggtaa

SEQ ID NO: 286528 - DNA, 25 bp, probe
taagtaccagccaagtacacacgat

SEQ ID NO: 286529 - DNA, 25 bp, probe
taagtcccagtcattgagtctcgag

SEQ ID NO: 286530 - DNA, 25 bp, probe
taagtccaagtgcaaggacctgaag

SEQ ID NO: 286531 - DNA, 25 bp, probe
taagtggcgtgtgcatagcgtcctg

SEQ ID NO: 286532 - DNA, 25 bp, probe
taagtgccttgcggtcagggactga

SEQ ID NO: 286533 - DNA, 25 bp, probe
tacagcctacccatgcagggactgg

SEQ ID NO: 286534 - DNA, 25 bp, probe
taagttcaccaccgagagcgacgtg

SEQ ID NO: 286535 - DNA, 25 bp, probe
taagttcatccctgcaaggatctgc

SEQ ID NO: 286536 - DNA, 25 bp, probe
taaggatcatctctctgaaggactg

SEQ ID NO: 286537 - DNA, 25 bp, probe
taaggagctgctccgattcaggagg

SEQ ID NO: 286538 - DNA, 25 bp, probe
taaggagctgctccgattcaggagg

SEQ ID NO: 286539 - DNA, 25 bp, probe
taatggacttgggttccatgaatca

SEQ ID NO: 286540 - DNA, 25 bp, probe
taatgtatctagtgtgtcctgtgac

SEQ ID NO: 286541 - DNA, 25 bp, probe
taagtatcttcatgtatccctgtta

SEQ ID NO: 286542 - DNA, 25 bp, probe
taatgtatttctcttacctgcttct

SEQ ID NO: 286543 - DNA, 25 bp, probe
taatgtagttctttgttcctgcttt

SEQ ID NO: 286544 - DNA, 25 bp, probe
taatctgaggtttggcatgtcctgt

SEQ ID NO: 286545 - DNA, 25 bp, probe
taatgccatggtgctggagctcctt

SEQ ID NO: 286546 - DNA, 25 bp, probe
taactctgctgtgctggagatcatc

SEQ ID NO: 286547 - DNA, 25 bp, probe
taagtctcagctggatgcagtgaac

SEQ ID NO: 286548 - DNA, 25 bp, probe
taagatgacagatgatgctgtcaag

SEQ ID NO: 286549 - DNA, 25 bp, probe
tacaggcagcgatggtctcagaaac

SEQ ID NO: 286550 - DNA, 25 bp, probe
taaagtggattgtcactcagaaaaa

SEQ ID NO: 286551 - DNA, 25 bp, probe
taaagtggattgtcactcagaaaaa

SEQ ID NO: 286552 - DNA, 25 bp, probe
taagttgtattggcccataacaatt

SEQ ID NO: 286553 - DNA, 25 bp, probe
taagatttattagccaaacttgaat

SEQ ID NO: 286554 - DNA, 25 bp, probe
taatgagttttatccaagaccttac

SEQ ID NO: 286555 - DNA, 25 bp, probe
taaaatattttgtaattacctgtag

SEQ ID NO: 286556 - DNA, 25 bp, probe
taaaaagcatttgtcttaccttcaa

SEQ ID NO: 286557 - DNA, 25 bp, probe
taaaaagcatttgtcttaccttcaa

SEQ ID NO: 286558 - DNA, 25 bp, probe
taagagaaacctgccttcaccaaaa

SEQ ID NO: 286559 - DNA, 25 bp, probe
taaggagtactcgacctgtaccagc

SEQ ID NO: 286560 - DNA, 25 bp, probe
tacagtagtgactcccatgctaaac

SEQ ID NO: 286561 - DNA, 25 bp, probe
tacagctgggtgtgactcagtaaag

SEQ ID NO: 286562 - DNA, 25 bp, probe
tacagggttggttctcatttcgtgc

SEQ ID NO: 286563 - DNA, 25 bp, probe
taaggagatttgagccaccacgtgc

SEQ ID NO: 286564 - DNA, 25 bp, probe
taaggagatttgagccaccacgtgc

SEQ ID NO: 286565 - DNA, 25 bp, probe
taagaggctgctgaaaaccatctgg

SEQ ID NO: 286566 - DNA, 25 bp, probe
tacagggcctgaagtacacattctc

SEQ ID NO: 286567 - DNA, 25 bp, probe
taagctggtctatgtccatcacctt

SEQ ID NO: 286568 - DNA, 25 bp, probe
taacttttcaagccaatcccttaat

SEQ ID NO: 286569 - DNA, 25 bp, probe
taacttttcacccaaaccatgctta

SEQ ID NO: 286570 - DNA, 25 bp, probe
taacttcatggctgcaaaactctga

SEQ ID NO: 286571 - DNA, 25 bp, probe
taagaacttctccaacgacatcatg

SEQ ID NO: 286572 - DNA, 25 bp, probe
taaccagttctccatactgcttgca

SEQ ID NO: 286573 - DNA, 25 bp, probe
taagcagctgtatgccatgaaggta

SEQ ID NO: 286574 - DNA, 25 bp, probe
taatgcctgtattcctgtaggatgt

SEQ ID NO: 286575 - DNA, 25 bp, probe
taaccagtaagccttagttgtacat

SEQ ID NO: 286576 - DNA, 25 bp, probe
taaccattacagcctgtatttgcca

SEQ ID NO: 286577 - DNA, 25 bp, probe
taaccatgtagtttgtaccatcact

SEQ ID NO: 286578 - DNA, 25 bp, probe
taaccctagatatggcagctcttta

SEQ ID NO: 286579 - DNA, 25 bp, probe
taaccattcgactgagcacactttc

SEQ ID NO: 286580 - DNA, 25 bp, probe
taaccatttgcactggagttctatg

SEQ ID NO: 286581 - DNA, 25 bp, probe
taaccagttgcactacataatctct

SEQ ID NO: 286582 - DNA, 25 bp, probe
taaccgctacactacagagtctgat

SEQ ID NO: 286583 - DNA, 25 bp, probe
taagcccatcaagaaagtcatggtg

SEQ ID NO: 286584 - DNA, 25 bp, probe
taaccactaccttacagtgagggct

SEQ ID NO: 286585 - DNA, 25 bp, probe
taaccactaccttacagtgagggct

SEQ ID NO: 286586 - DNA, 25 bp, probe
taaaactaccaatcctggggagtcg

SEQ ID NO: 286587 - DNA, 25 bp, probe
taacaactacgagctcaacctgggt

SEQ ID NO: 286588 - DNA, 25 bp, probe
taacaactacgagctcaacctgggt

SEQ ID NO: 286589 - DNA, 25 bp, probe
taaacgaactgaactaggcctggtg

SEQ ID NO: 286590 - DNA, 25 bp, probe
taaacgaactgaactaggcctggtg

SEQ ID NO: 286591 - DNA, 25 bp, probe
taaacaacgtgtatagtgcctaaaa

SEQ ID NO: 286592 - DNA, 25 bp, probe
taaagcaagggtaccgccacataca

SEQ ID NO: 286593 - DNA, 25 bp, probe
tacaaaacgggctacaccaatagaa

SEQ ID NO: 286594 - DNA, 25 bp, probe
tacctaagaggggaaccatttgaag

SEQ ID NO: 286595 - DNA, 25 bp, probe
tagcttaggaggcacaccctactgc

SEQ ID NO: 286596 - DNA, 25 bp, probe
tagtctgaccctgaacgttagtctc

SEQ ID NO: 286597 - DNA, 25 bp, probe
taatctgattttgaacttgttttcc

SEQ ID NO: 286598 - DNA, 25 bp, probe
taatctgttttataccttgcttatt

SEQ ID NO: 286599 - DNA, 25 bp, probe
taatctgtatttattgtcttttgta

SEQ ID NO: 286600 - DNA, 25 bp, probe
taactagaactgaattttgtcttta

SEQ ID NO: 286601 - DNA, 25 bp, probe
taactaaaatctatgtgcttttcaa

SEQ ID NO: 286602 - DNA, 25 bp, probe
taaccaaaatacctccttcattata

SEQ ID NO: 286603 - DNA, 25 bp, probe
taaccaaaatacctccttcattata

SEQ ID NO: 286604 - DNA, 25 bp, probe
taacgaacaacagcaacgtcttgaa

SEQ ID NO: 286605 - DNA, 25 bp, probe
taacccaccacagctagaacttatc

SEQ ID NO: 286606 - DNA, 25 bp, probe
taagccaccaatccctgaaagatta

SEQ ID NO: 286607 - DNA, 25 bp, probe
taagctcaaaatctagaagagtcta

SEQ ID NO: 286608 - DNA, 25 bp, probe
taatgtatctaaacaagctaaccta

SEQ ID NO: 286609 - DNA, 25 bp, probe
taaaatgtagccaaagctcaccttt

SEQ ID NO: 286610 - DNA, 25 bp, probe
taaaatgtagccaaagctcaccttt

SEQ ID NO: 286611 - DNA, 25 bp, probe
taacttctccgcaagttgtcctatt

SEQ ID NO: 286612 - DNA, 25 bp, probe
taagtatgtcgccattgttgtacaa

SEQ ID NO: 286613 - DNA, 25 bp, probe
taagcatttcccagctgtgtaaaaa

SEQ ID NO: 286614 - DNA, 25 bp, probe
taaattgtgtccctgtattaccaaa

SEQ ID NO: 286615 - DNA, 25 bp, probe
taagaagatgtagctttctgacaaa

SEQ ID NO: 286616 - DNA, 25 bp, probe
taaaagagaactctctgcccaacac

SEQ ID NO: 286617 - DNA, 25 bp, probe
taaaaacagctctctatcccaatac

SEQ ID NO: 286618 - DNA, 25 bp, probe
tacattagaacacccaaactccacc

SEQ ID NO: 286619 - DNA, 25 bp, probe
tacattagaacacccaaactccacc

SEQ ID NO: 286620 - DNA, 25 bp, probe
taagttacaagagaccacatccacc

SEQ ID NO: 286621 - DNA, 25 bp, probe
taaattaagacagcattgatctcct

SEQ ID NO: 286622 - DNA, 25 bp, probe
taacatttgcaggacacttttacag

SEQ ID NO: 286623 - DNA, 25 bp, probe
taacattggccagcatctgtttatc

SEQ ID NO: 286624 - DNA, 25 bp, probe
taagatgtgtgagcgcactcgtttc

SEQ ID NO: 286625 - DNA, 25 bp, probe
taatgttagaaccgcatcctttcag

SEQ ID NO: 286626 - DNA, 25 bp, probe
taatgtctcaaagctgtgcagtctt

SEQ ID NO: 286627 - DNA, 25 bp, probe
taatgtctaagaaatccagcttcat

SEQ ID NO: 286628 - DNA, 25 bp, probe
taaactatagtggctgccagtagca

SEQ ID NO: 286629 - DNA, 25 bp, probe
taacactcttgtgaccgtgccaaga

SEQ ID NO: 286630 - DNA, 25 bp, probe
taaccctgtttagcattcactaagc

SEQ ID NO: 286631 - DNA, 25 bp, probe
taaggactgaagtacctgtcactaa

SEQ ID NO: 286632 - DNA, 25 bp, probe
taagaactgaggaacctgagactca

SEQ ID NO: 286633 - DNA, 25 bp, probe
taactactgacttcactggagtctc

SEQ ID NO: 286634 - DNA, 25 bp, probe
taacacttgacattattggaccccc

SEQ ID NO: 286635 - DNA, 25 bp, probe
taatccaggacagcattacacgcca

SEQ ID NO: 286636 - DNA, 25 bp, probe
ttatccagcaccgtttctgggcaca

SEQ ID NO: 286637 - DNA, 25 bp, probe
taatgaaacaccttctctggagcca

SEQ ID NO: 286638 - DNA, 25 bp, probe
taaacaacgttctatctggcaactg

SEQ ID NO: 286639 - DNA, 25 bp, probe
taacctggcatttacttagcaactg

SEQ ID NO: 286640 - DNA, 25 bp, probe
taaccggcactacgccaagatcagc

SEQ ID NO: 286641 - DNA, 25 bp, probe
taacctgagccagagctcactacac

SEQ ID NO: 286642 - DNA, 25 bp, probe
taagccggcagcaagcagttctacc

SEQ ID NO: 286643 - DNA, 25 bp, probe
taatgccactgggcacctttcagac

SEQ ID NO: 286644 - DNA, 25 bp, probe
taatgttttgctactcttgtcagac

SEQ ID NO: 286645 - DNA, 25 bp, probe
taaggttcttgagcttatctcccaa

SEQ ID NO: 286646 - DNA, 25 bp, probe
taagcctttcgtgtttttccacagg

SEQ ID NO: 286647 - DNA, 25 bp, probe
taacttttacttgctttttccagag

SEQ ID NO: 286648 - DNA, 25 bp, probe
taaattttttggcttttcatctaag

SEQ ID NO: 286649 - DNA, 25 bp, probe
taagtcttttagacgtgccttcctc

SEQ ID NO: 286650 - DNA, 25 bp, probe
taatgtttcatttgacggtctcttt

SEQ ID NO: 286651 - DNA, 25 bp, probe
taatgattgtttaaaggtttctatt

SEQ ID NO: 286652 - DNA, 25 bp, probe
taagttgtattttctatgtttctag

SEQ ID NO: 286653 - DNA, 25 bp, probe
taacttgtttggtatactttgcttt

SEQ ID NO: 286654 - DNA, 25 bp, probe
taacctttagtgttactgaatctta

SEQ ID NO: 286655 - DNA, 25 bp, probe
taacccctaaggaagtgcagtcttt

SEQ ID NO: 286656 - DNA, 25 bp, probe
taaccagcctgtgggttgtagccct

SEQ ID NO: 286657 - DNA, 25 bp, probe
taaccacgcacccaggttagactct

SEQ ID NO: 286658 - DNA, 25 bp, probe
taaccacgcacccaggttagactct

SEQ ID NO: 286659 - DNA, 25 bp, probe
taacaaccacgggtgtaagtgccat

SEQ ID NO: 286660 - DNA, 25 bp, probe
taccagatcacctggtggaggtacc

SEQ ID NO: 286661 - DNA, 25 bp, probe
tacactaacatttgatgttagcgta

SEQ ID NO: 286662 - DNA, 25 bp, probe
tagcctggtcttcattgtcaggaag

SEQ ID NO: 286663 - DNA, 25 bp, probe
tacgtcgccctggacttcgagcaag

SEQ ID NO: 286664 - DNA, 25 bp, probe
taaatgccctccaacttagtgatga

SEQ ID NO: 286665 - DNA, 25 bp, probe
taacctccctcaacaaggtatacct

SEQ ID NO: 286666 - DNA, 25 bp, probe
taacaccacctgatcagctggttat

SEQ ID NO: 286667 - DNA, 25 bp, probe
taagcaccaccgatccagggatcat

SEQ ID NO: 286668 - DNA, 25 bp, probe
taacattcttcgatctctgggattt

SEQ ID NO: 286669 - DNA, 25 bp, probe
taagattgctgtttttctgtccttg

SEQ ID NO: 286670 - DNA, 25 bp, probe
taaacttggcagtttctaacttgtg

SEQ ID NO: 286671 - DNA, 25 bp, probe
taaactttagacttcccactgttct

SEQ ID NO: 286672 - DNA, 25 bp, probe
taaactttagacttcccactgttct

SEQ ID NO: 286673 - DNA, 25 bp, probe
taagagctttattagttccactgtt

SEQ ID NO: 286674 - DNA, 25 bp, probe
taagatgtctcttgatttacctgag

SEQ ID NO: 286675 - DNA, 25 bp, probe
taagagtgcttgtcattataaaagt

SEQ ID NO: 286676 - DNA, 25 bp, probe
taagggctttatgtgaactatgata

SEQ ID NO: 286677 - DNA, 25 bp, probe
taaggccatgtcactagaagcgcag

SEQ ID NO: 286678 - DNA, 25 bp, probe
taaggctcttgcactgtgacagagc

SEQ ID NO: 286679 - DNA, 25 bp, probe
taatgagtactgggtgctgacggct

SEQ ID NO: 286680 - DNA, 25 bp, probe
taatggtgactatgtgctgctcttc

SEQ ID NO: 286681 - DNA, 25 bp, probe
taatggtgactatgtgctgctcttc

SEQ ID NO: 286682 - DNA, 25 bp, probe
taaggagcgctgtgtgctgctagtg

SEQ ID NO: 286683 - DNA, 25 bp, probe
taaggatgactctggtcagagatac

SEQ ID NO: 286684 - DNA, 25 bp, probe
taactggatctcttggccacagata

SEQ ID NO: 286685 - DNA, 25 bp, probe
taacatggtcatttccggagtactt

SEQ ID NO: 286686 - DNA, 25 bp, probe
taatgtggttcagtacggctgtacc

SEQ ID NO: 286687 - DNA, 25 bp, probe
taatgggtgtcatcttggcccatcc

SEQ ID NO: 286688 - DNA, 25 bp, probe
taaggagcctcaaatcgagcccact

SEQ ID NO: 286689 - DNA, 25 bp, probe
taagaggacgccttcaggcaccaca

SEQ ID NO: 286690 - DNA, 25 bp, probe
taatgatccctggcaacggacagcc

SEQ ID NO: 286691 - DNA, 25 bp, probe
taagtcccgggcagcgataagcccc

SEQ ID NO: 286692 - DNA, 25 bp, probe
taacccttggtctgtaagcaccacc

SEQ ID NO: 286693 - DNA, 25 bp, probe
taacctctctggccaagctaatgaa

SEQ ID NO: 286694 - DNA, 25 bp, probe
taatgtctcctccgaagaaaactaa

SEQ ID NO: 286695 - DNA, 25 bp, probe
taggtcctacctcagaaaatctcat

SEQ ID NO: 286696 - DNA, 25 bp, probe
taggacctgatttaaagtgaatttc

SEQ ID NO: 286697 - DNA, 25 bp, probe
taagaccgcaattctaagtttctag

SEQ ID NO: 286698 - DNA, 25 bp, probe
taaggctgaaattctagatcttttc

SEQ ID NO: 286699 - DNA, 25 bp, probe
taagttacatgacctatatcttttc

SEQ ID NO: 286700 - DNA, 25 bp, probe
taagatggtcatattattcttcttc

SEQ ID NO: 286701 - DNA, 25 bp, probe
taaggtgtcttaatactgtcctttt

SEQ ID NO: 286702 - DNA, 25 bp, probe
taatggtgaaaacgtcttccttctt

SEQ ID NO: 286703 - DNA, 25 bp, probe
tacagggaaaaccctatctctttct

SEQ ID NO: 286704 - DNA, 25 bp, probe
taatggtatgagtaccctcctcctt

SEQ ID NO: 286705 - DNA, 25 bp, probe
taagttcaatgttcccatcactcga

SEQ ID NO: 286706 - DNA, 25 bp, probe
taagttcaatgttcccatcactcga

SEQ ID NO: 286707 - DNA, 25 bp, probe
taagtacattgtttccacttcttga

SEQ ID NO: 286708 - DNA, 25 bp, probe
taatgttttgtaatgtccttttaat

SEQ ID NO: 286709 - DNA, 25 bp, probe
taatgttttgtaatgtccttttaat

SEQ ID NO: 286710 - DNA, 25 bp, probe
taatgttttggaagagctttttatt

SEQ ID NO: 286711 - DNA, 25 bp, probe
taagttatctgaaaacatgtttttt

SEQ ID NO: 286712 - DNA, 25 bp, probe
taatgtagactgataaacccttatt

SEQ ID NO: 286713 - DNA, 25 bp, probe
taatgtagactgataaacccttatt

SEQ ID NO: 286714 - DNA, 25 bp, probe
taacctgatagaattaactcgtatt

SEQ ID NO: 286715 - DNA, 25 bp, probe
taagcctttttgtcacctcaatatt

SEQ ID NO: 286716 - DNA, 25 bp, probe
taagcctttttgtcacctcaatatt

SEQ ID NO: 286717 - DNA, 25 bp, probe
taaccctttatcgcctgcagaattc

SEQ ID NO: 286718 - DNA, 25 bp, probe
taaaactccaacacaaagaatatct

SEQ ID NO: 286719 - DNA, 25 bp, probe
taaaactccattattaggattacat

SEQ ID NO: 286720 - DNA, 25 bp, probe
taaaatgctacaaaccaaagatgga

SEQ ID NO: 286721 - DNA, 25 bp, probe
taaggtgctcacaaaaatacagtgt

SEQ ID NO: 286722 - DNA, 25 bp, probe
taaggtgctcacaaaaatacagtgt

SEQ ID NO: 286723 - DNA, 25 bp, probe
taaggtttcttatgtgactgcgatg

SEQ ID NO: 286724 - DNA, 25 bp, probe
taaggatgtttgatagttctggaaa

SEQ ID NO: 286725 - DNA, 25 bp, probe
taaagatttctgaggttgggattaa

SEQ ID NO: 286726 - DNA, 25 bp, probe
ttaataaactggtgttctggttcat

SEQ ID NO: 286727 - DNA, 25 bp, probe
ttaagagaattttggatggtcgttt

SEQ ID NO: 286728 - DNA, 25 bp, probe
taaaagaattcttcaagggctaatt

SEQ ID NO: 286729 - DNA, 25 bp, probe
taagcatggacagaggcatagggct

SEQ ID NO: 286730 - DNA, 25 bp, probe
taagcatctaatcagctcaaaagct

SEQ ID NO: 286731 - DNA, 25 bp, probe
taagcatctaatcagctcaaaagct

SEQ ID NO: 286732 - DNA, 25 bp, probe
taacaccagtgtagccaaaagagaa

SEQ ID NO: 286733 - DNA, 25 bp, probe
taactggcctgatctaacaatgaaa

SEQ ID NO: 286734 - DNA, 25 bp, probe
taactggccgtatatggcaattcaa

SEQ ID NO: 286735 - DNA, 25 bp, probe
taatgtggacggttatgactactca

SEQ ID NO: 286736 - DNA, 25 bp, probe
taatggttccatttagactactttc

SEQ ID NO: 286737 - DNA, 25 bp, probe
taaagtaccctttgattactgtcag

SEQ ID NO: 286738 - DNA, 25 bp, probe
taaagacaccatgaggggactgaag

SEQ ID NO: 286739 - DNA, 25 bp, probe
taaaagcatgccaaatcttggagct

SEQ ID NO: 286740 - DNA, 25 bp, probe
taaggcaggccctactgctgtatct

SEQ ID NO: 286741 - DNA, 25 bp, probe
taaggcaggccctactgctgtatct

SEQ ID NO: 286742 - DNA, 25 bp, probe
taaggaagccaggtcttctctcttc

SEQ ID NO: 286743 - DNA, 25 bp, probe
taaggaaaacttagctcctgctttt

SEQ ID NO: 286744 - DNA, 25 bp, probe
taaggaagacttatctcctgccttt

SEQ ID NO: 286745 - DNA, 25 bp, probe
tacaggggaggggtctagctccttt

SEQ ID NO: 286746 - DNA, 25 bp, probe
tagggcagggggcatttgtcccctc

SEQ ID NO: 286747 - DNA, 25 bp, probe
tagaaaaagaggcgcttctcccctc

SEQ ID NO: 286748 - DNA, 25 bp, probe
tacacgaaaggacctgcttctccac

SEQ ID NO: 286749 - DNA, 25 bp, probe
taaggacagcatgaactgaccaccc

SEQ ID NO: 286750 - DNA, 25 bp, probe
taaggaaggcaatgcagcccatccc

SEQ ID NO: 286751 - DNA, 25 bp, probe
taaggaattcgatgatgacacttac

SEQ ID NO: 286752 - DNA, 25 bp, probe
taagaaattccatgatgcttgcctg

SEQ ID NO: 286753 - DNA, 25 bp, probe
taaggagtgtaccaatctctgctgt

SEQ ID NO: 286754 - DNA, 25 bp, probe
taagggagttcattgatttggttga

SEQ ID NO: 286755 - DNA, 25 bp, probe
taagaagatgttattttgttgggtt

SEQ ID NO: 286756 - DNA, 25 bp, probe
taagatgaatgaggggtttgagtgg

SEQ ID NO: 286757 - DNA, 25 bp, probe
taagtgacgagggggctgggtcggc

SEQ ID NO: 286758 - DNA, 25 bp, probe
taaggatcttggggaggtggccggg

SEQ ID NO: 286759 - DNA, 25 bp, probe
taaggacaggtggaagtgtggcagg

SEQ ID NO: 286760 - DNA, 25 bp, probe
taacaacagtaccaaggtggctgtg

SEQ ID NO: 286761 - DNA, 25 bp, probe
taaacccttggaaatctgtgtgtgt

SEQ ID NO: 286762 - DNA, 25 bp, probe
taaacgcttaaaaacattgcaggat

SEQ ID NO: 286763 - DNA, 25 bp, probe
taaaccttagaaaacatttgcctca

SEQ ID NO: 286764 - DNA, 25 bp, probe
taacctcattcaaacagacagaggc

SEQ ID NO: 286765 - DNA, 25 bp, probe
taagctgctcaaagagggacacagg

SEQ ID NO: 286766 - DNA, 25 bp, probe
taagcggcaacaagggtccgtggac

SEQ ID NO: 286767 - DNA, 25 bp, probe
taagccctacataggattctcagtg

SEQ ID NO: 286768 - DNA, 25 bp, probe
taagtgcctataaccatgttctata

SEQ ID NO: 286769 - DNA, 25 bp, probe
taagtgcttagctgccatgagggaa

SEQ ID NO: 286770 - DNA, 25 bp, probe
taaatgtgcattcatcaaaggagaa

SEQ ID NO: 286771 - DNA, 25 bp, probe
taaattgggtcacagaggcagaaat

SEQ ID NO: 286772 - DNA, 25 bp, probe
taaatttgtaaatatggctgcacca

SEQ ID NO: 286773 - DNA, 25 bp, probe
tacctttgggggcaacagcacccta

SEQ ID NO: 286774 - DNA, 25 bp, probe
tacctttgggggcaacagcacccta

SEQ ID NO: 286775 - DNA, 25 bp, probe
taccttccagaacaaaatgactcct

SEQ ID NO: 286776 - DNA, 25 bp, probe
taccttccagaacaaaatgactcct

SEQ ID NO: 286777 - DNA, 25 bp, probe
taacttgcgcagaaaacaagatgag

SEQ ID NO: 286778 - DNA, 25 bp, probe
taaagtccagtattactaaggtaag

SEQ ID NO: 286779 - DNA, 25 bp, probe
taaagatccgctctttcagtgggag

SEQ ID NO: 286780 - DNA, 25 bp, probe
taaaatcacgtgctccacagcttca

SEQ ID NO: 286781 - DNA, 25 bp, probe
taaagtcatacgctccaactgatcc

SEQ ID NO: 286782 - DNA, 25 bp, probe
taaagtcatacgctccaactgatcc

SEQ ID NO: 286783 - DNA, 25 bp, probe
taaagctacctcctaaactatagtg

SEQ ID NO: 286784 - DNA, 25 bp, probe
taaaaacccgtatagctttcagtca

SEQ ID NO: 286785 - DNA, 25 bp, probe
taaaacagtccttcaaacttccagt

SEQ ID NO: 286786 - DNA, 25 bp, probe
taacaactaccttatttttcactgt

SEQ ID NO: 286787 - DNA, 25 bp, probe
taacaactaccttatttttcactgt

SEQ ID NO: 286788 - DNA, 25 bp, probe
taaaatctgatttaatgttttctgc

SEQ ID NO: 286789 - DNA, 25 bp, probe
taagaacacatttgaacttggctca

SEQ ID NO: 286790 - DNA, 25 bp, probe
taagaacacatttgaacttggctca

SEQ ID NO: 286791 - DNA, 25 bp, probe
taaacccatctgtaatatattgcca

SEQ ID NO: 286792 - DNA, 25 bp, probe
taaacccatctgtaatatattgcca

SEQ ID NO: 286793 - DNA, 25 bp, probe
taacctccctattcagaaagctcca

SEQ ID NO: 286794 - DNA, 25 bp, probe
tagtccctcctatcaaacaattaca

SEQ ID NO: 286795 - DNA, 25 bp, probe
taaccctgcctttgaaagatttcaa

SEQ ID NO: 286796 - DNA, 25 bp, probe
taaccagtcttttgaatcacttagc

SEQ ID NO: 286797 - DNA, 25 bp, probe
tactttgtgggttgcaatacaaact

SEQ ID NO: 286798 - DNA, 25 bp, probe
tacactttggctatgaacaaataat

SEQ ID NO: 286799 - DNA, 25 bp, probe
tacacgattgcccctgaatcagata

SEQ ID NO: 286800 - DNA, 25 bp, probe
taactttgccgcccgagatatgagg

SEQ ID NO: 286801 - DNA, 25 bp, probe
taactttgccgcccgagatatgagg

SEQ ID NO: 286802 - DNA, 25 bp, probe
taactttgccgcccgagatatgagg

SEQ ID NO: 286803 - DNA, 25 bp, probe
taagcgttgagccaccaagctggtg

SEQ ID NO: 286804 - DNA, 25 bp, probe
taacagatatggcagcttagaggtg

SEQ ID NO: 286805 - DNA, 25 bp, probe
taacagatatggcagcttagaggtg

SEQ ID NO: 286806 - DNA, 25 bp, probe
taacagcatctcggaggccaagatg

SEQ ID NO: 286807 - DNA, 25 bp, probe
taacaactcagccatctggcacagg

SEQ ID NO: 286808 - DNA, 25 bp, probe
taactaccagcattgagaacatgaa

SEQ ID NO: 286809 - DNA, 25 bp, probe
taactccacagatcgaatcaaagtc

SEQ ID NO: 286810 - DNA, 25 bp, probe
taagcccacatccactgagtaaaga

SEQ ID NO: 286811 - DNA, 25 bp, probe
taagacgtgattttgctgtagaaga

SEQ ID NO: 286812 - DNA, 25 bp, probe
taaagctgtataatgggccaaaaaa

SEQ ID NO: 286813 - DNA, 25 bp, probe
taaagctgtctgaagcggacaagct

SEQ ID NO: 286814 - DNA, 25 bp, probe
taagagcttctggtgctgtccattt

SEQ ID NO: 286815 - DNA, 25 bp, probe
taagagtcaatctgcaagccatttt

SEQ ID NO: 286816 - DNA, 25 bp, probe
taagagctctattaattgccatgtt

SEQ ID NO: 286817 - DNA, 25 bp, probe
taagaagtagtgtttccatgctctg

SEQ ID NO: 286818 - DNA, 25 bp, probe
taagaagtcagctctcttcatccag

SEQ ID NO: 286819 - DNA, 25 bp, probe
taagaacagcctggtcttcatcacc

SEQ ID NO: 286820 - DNA, 25 bp, probe
taagatgcccctgggctatgaccac

SEQ ID NO: 286821 - DNA, 25 bp, probe
tacaatgcttaccggttacactcca

SEQ ID NO: 286822 - DNA, 25 bp, probe
taaactgtaccaccttaaccatttg

SEQ ID NO: 286823 - DNA, 25 bp, probe
taaaccagtccactgttatacccgg

SEQ ID NO: 286824 - DNA, 25 bp, probe
taaagatcagtcccagttataaact

SEQ ID NO: 286825 - DNA, 25 bp, probe
tatattacagtcaccccataaaaaa

SEQ ID NO: 286826 - DNA, 25 bp, probe
tatattacagtcaccccataaaaaa

SEQ ID NO: 286827 - DNA, 25 bp, probe
ttaataatgcgctccccaaacagaa

SEQ ID NO: 286828 - DNA, 25 bp, probe
ttaataatgcgctccccaaacagaa

SEQ ID NO: 286829 - DNA, 25 bp, probe
tataaatgggcttcccacccacaaa

SEQ ID NO: 286830 - DNA, 25 bp, probe
taaaatgggccccacagcaactctg

SEQ ID NO: 286831 - DNA, 25 bp, probe
taaagggggcattacgcaacttggt

SEQ ID NO: 286832 - DNA, 25 bp, probe
taaagggggtctcacttttgccatc

SEQ ID NO: 286833 - DNA, 25 bp, probe
taaagggggtctcacttttgccatc

SEQ ID NO: 286834 - DNA, 25 bp, probe
taaatggaggagacctaatgtttca

SEQ ID NO: 286835 - DNA, 25 bp, probe
taagatggaagagtggtacagtttt

SEQ ID NO: 286836 - DNA, 25 bp, probe
taagtggctttttgtactgtagttc

SEQ ID NO: 286837 - DNA, 25 bp, probe
taaggtgagtatactaagggagttc

SEQ ID NO: 286838 - DNA, 25 bp, probe
taaggtagtgttcccaaggtgttct

SEQ ID NO: 286839 - DNA, 25 bp, probe
taaggtagtgttcccaaggtgttct

SEQ ID NO: 286840 - DNA, 25 bp, probe
taaagttgttctcccaagagctttg

SEQ ID NO: 286841 - DNA, 25 bp, probe
tataaatatttctccagcaaatttg

SEQ ID NO: 286842 - DNA, 25 bp, probe
taaaactgtggcaccttaattttga

SEQ ID NO: 286843 - DNA, 25 bp, probe
taccagaattccgcctcttaaggga

SEQ ID NO: 286844 - DNA, 25 bp, probe
taaccaggtcctgccatttattggg

SEQ ID NO: 286845 - DNA, 25 bp, probe
taaacaggaccttccaaaatatctc

SEQ ID NO: 286846 - DNA, 25 bp, probe
taaagggaactttctatgcaatgtt

SEQ ID NO: 286847 - DNA, 25 bp, probe
taaagggaactttctatgcaatgtt

SEQ ID NO: 286848 - DNA, 25 bp, probe
taacccagacttaatcttgaatgat

SEQ ID NO: 286849 - DNA, 25 bp, probe
taacccagacttaatcttgaatgat

SEQ ID NO: 286850 - DNA, 25 bp, probe
taaaccacacttagtcctgatgtac

SEQ ID NO: 286851 - DNA, 25 bp, probe
taacaccacttcttttcatctgtac

SEQ ID NO: 286852 - DNA, 25 bp, probe
taacataagcttgtcaatgcacatg

SEQ ID NO: 286853 - DNA, 25 bp, probe
taagctacatatggccatcttgaca

SEQ ID NO: 286854 - DNA, 25 bp, probe
taagtgcagcatttttgcatctgac

SEQ ID NO: 286855 - DNA, 25 bp, probe
taagtccagacttggcacatggcta

SEQ ID NO: 286856 - DNA, 25 bp, probe
taagaaagttagtcacatggctgtg

SEQ ID NO: 286857 - DNA, 25 bp, probe
taaacagtgttacacggctttcctc

SEQ ID NO: 286858 - DNA, 25 bp, probe
taaactgtttcagagcttcttccct

SEQ ID NO: 286859 - DNA, 25 bp, probe
taaactgtttcagagcttcttccct

SEQ ID NO: 286860 - DNA, 25 bp, probe
taaatctgtcgtaaactctccacac

SEQ ID NO: 286861 - DNA, 25 bp, probe
taaatctgtcgtaaactctccacac

SEQ ID NO: 286862 - DNA, 25 bp, probe
taagcatccacagtacaagccttga

SEQ ID NO: 286863 - DNA, 25 bp, probe
taagactaatgctcagaacctaacc

SEQ ID NO: 286864 - DNA, 25 bp, probe
taagactaatgctcagaacctaacc

SEQ ID NO: 286865 - DNA, 25 bp, probe
taaacaagatcgtcaggaccaaaaa

SEQ ID NO: 286866 - DNA, 25 bp, probe
taaacgagtttctcagctctattca

SEQ ID NO: 286867 - DNA, 25 bp, probe
taaaaagactactggcctctgtgcc

SEQ ID NO: 286868 - DNA, 25 bp, probe
taagcaaagagggcaatcgcctcct

SEQ ID NO: 286869 - DNA, 25 bp, probe
taagaaagagccgaaagcaccactg

SEQ ID NO: 286870 - DNA, 25 bp, probe
taaaccaaggctagaaccacctgcc

SEQ ID NO: 286871 - DNA, 25 bp, probe
taaaccagactcactaaatcctttc

SEQ ID NO: 286872 - DNA, 25 bp, probe
taaaacagttaagagagtccttgtg

SEQ ID NO: 286873 - DNA, 25 bp, probe
taaatccctgtatcgtggacctttt

SEQ ID NO: 286874 - DNA, 25 bp, probe
taaatcctcctgtaatggaacctgt

SEQ ID NO: 286875 - DNA, 25 bp, probe
tactacctcactagacatccaaagg

SEQ ID NO: 286876 - DNA, 25 bp, probe
taaacaccagtgaactgatcaaaga

SEQ ID NO: 286877 - DNA, 25 bp, probe
taaaccctagaactcaaaagtatca

SEQ ID NO: 286878 - DNA, 25 bp, probe
taaagagtctagattcaaaggttct

SEQ ID NO: 286879 - DNA, 25 bp, probe
taaagagtctagattcaaaggttct

SEQ ID NO: 286880 - DNA, 25 bp, probe
taagtggataagattacacagatta

SEQ ID NO: 286881 - DNA, 25 bp, probe
taagtacagaaggtgctaaagttga

SEQ ID NO: 286882 - DNA, 25 bp, probe
taacgacagaaggttgccaggtaaa

SEQ ID NO: 286883 - DNA, 25 bp, probe
taacgacagaaggttgccaggtaaa

SEQ ID NO: 286884 - DNA, 25 bp, probe
taacacaggaacaactgccggtgat

SEQ ID NO: 286885 - DNA, 25 bp, probe
taaaagaggaattcccaattatgaa

SEQ ID NO: 286886 - DNA, 25 bp, probe
taaaaattgctctggccttatctga

SEQ ID NO: 286887 - DNA, 25 bp, probe
taaggtgttgacttgcctctttcag

SEQ ID NO: 286888 - DNA, 25 bp, probe
taaactgggatgcagtttttcagaa

SEQ ID NO: 286889 - DNA, 25 bp, probe
taaacttaactgttctttgccagaa

SEQ ID NO: 286890 - DNA, 25 bp, probe
taaagtttattgttgcttcgcaggg

SEQ ID NO: 286891 - DNA, 25 bp, probe
taaactaatttagcttctaggatcc

SEQ ID NO: 286892 - DNA, 25 bp, probe
taaagccaaccagcctttgggtcct

SEQ ID NO: 286893 - DNA, 25 bp, probe
taaacaaatctcacctttggggctg

SEQ ID NO: 286894 - DNA, 25 bp, probe
taaaaggctcacttgcctttggctt

SEQ ID NO: 286895 - DNA, 25 bp, probe
taaaagatgccatttggttgggtga

SEQ ID NO: 286896 - DNA, 25 bp, probe
taagggatgcagtggagtgtggtgg

SEQ ID NO: 286897 - DNA, 25 bp, probe
taaaggttggctgggtgtggcggct

SEQ ID NO: 286898 - DNA, 25 bp, probe
taaccctgatggtgatgtaggtggt

SEQ ID NO: 286899 - DNA, 25 bp, probe
taggcctcgtggctaaaggctcctt

SEQ ID NO: 286900 - DNA, 25 bp, probe
taagcctagtgatgggagagaccct

SEQ ID NO: 286901 - DNA, 25 bp, probe
taagcagagtggctgaggagatgac

SEQ ID NO: 286902 - DNA, 25 bp, probe
taagaggatcagccgggtgcaatga

SEQ ID NO: 286903 - DNA, 25 bp, probe
taagagcgctcaggctgggtgcagt

SEQ ID NO: 286904 - DNA, 25 bp, probe
taagcatggcctggactgactgcag

SEQ ID NO: 286905 - DNA, 25 bp, probe
tacatcacgcatgagagtgacgacg

SEQ ID NO: 286906 - DNA, 25 bp, probe
tacatcacgcatgagagtgacgacg

SEQ ID NO: 286907 - DNA, 25 bp, probe
tacatacgcatggattctgggtctc

SEQ ID NO: 286908 - DNA, 25 bp, probe
tacaacatcatggttctggtgaaca

SEQ ID NO: 286909 - DNA, 25 bp, probe
taaagccactttagtgagaagcagg

SEQ ID NO: 286910 - DNA, 25 bp, probe
taagcactcctccttgtggaaagaa

SEQ ID NO: 286911 - DNA, 25 bp, probe
taaactgtctcacctaaacaagata

SEQ ID NO: 286912 - DNA, 25 bp, probe
taaactgtctcacctaaacaagata

SEQ ID NO: 286913 - DNA, 25 bp, probe
taaaatttcctctgatactataagc

SEQ ID NO: 286914 - DNA, 25 bp, probe
taaacatttaacttgtttccaatgt

SEQ ID NO: 286915 - DNA, 25 bp, probe
taaacatttaacttgtttccaatgt

SEQ ID NO: 286916 - DNA, 25 bp, probe
taaacttataaatatttctccagca

SEQ ID NO: 286917 - DNA, 25 bp, probe
taaactattaaaattattctgctaa

SEQ ID NO: 286918 - DNA, 25 bp, probe
taaactattgactctatacctctaa

SEQ ID NO: 286919 - DNA, 25 bp, probe
taaactatcatagccctgcttacta

SEQ ID NO: 286920 - DNA, 25 bp, probe
taaactcaacatggccggttatgca

SEQ ID NO: 286921 - DNA, 25 bp, probe
taaagctaagcagtcctgccgtcat

SEQ ID NO: 286922 - DNA, 25 bp, probe
taaagatgctacttcccactgtatg

SEQ ID NO: 286923 - DNA, 25 bp, probe
taagagtgtaacatccagctctatg

SEQ ID NO: 286924 - DNA, 25 bp, probe
taagatgttggacttctgcaataga

SEQ ID NO: 286925 - DNA, 25 bp, probe
taagtataggattttgcacattgag

SEQ ID NO: 286926 - DNA, 25 bp, probe
taagttcagttattagtctgtgaag

SEQ ID NO: 286927 - DNA, 25 bp, probe
taagtatgttattttctgttgaagt

SEQ ID NO: 286928 - DNA, 25 bp, probe
taagtcattttgtttgtgtccacag

SEQ ID NO: 286929 - DNA, 25 bp, probe
taagtcagctgtatctggggccata

SEQ ID NO: 286930 - DNA, 25 bp, probe
taaataatgtgctctccggcttcac

SEQ ID NO: 286931 - DNA, 25 bp, probe
taaattgtatcttcacctggttcct

SEQ ID NO: 286932 - DNA, 25 bp, probe
taaactgtacttcagggatttgcca

SEQ ID NO: 286933 - DNA, 25 bp, probe
tactaggtagtataaggctttctca

SEQ ID NO: 286934 - DNA, 25 bp, probe
tacaagggaccttcaggccttttct

SEQ ID NO: 286935 - DNA, 25 bp, probe
taaaggcacacctcggtcttactta

SEQ ID NO: 286936 - DNA, 25 bp, probe
taaaggcacacctcggtcttactta

SEQ ID NO: 286937 - DNA, 25 bp, probe
taaagccaactctcgtttggcctgg

SEQ ID NO: 286938 - DNA, 25 bp, probe
taacaaccttgatcgtttcggctgg

SEQ ID NO: 286939 - DNA, 25 bp, probe
taaaaccctgacatgtattgcgggc

SEQ ID NO: 286940 - DNA, 25 bp, probe
taagacaggcctttcttttggtggc

SEQ ID NO: 286941 - DNA, 25 bp, probe
taagacaggcctttcttttggtggc

SEQ ID NO: 286942 - DNA, 25 bp, probe
taagaaggcacctctctgggttgaa

SEQ ID NO: 286943 - DNA, 25 bp, probe
taaaaacgcacagccgggcgagaaa

SEQ ID NO: 286944 - DNA, 25 bp, probe
taagagaacgaagaccacagcaaga

SEQ ID NO: 286945 - DNA, 25 bp, probe
taaagaattcatacgacttcgaaga

SEQ ID NO: 286946 - DNA, 25 bp, probe
taagagatactctgcagagcttcag

SEQ ID NO: 286947 - DNA, 25 bp, probe
taagcagttgccagtgacattctcc

SEQ ID NO: 286948 - DNA, 25 bp, probe
taagcagtggctgaatgccaacccc

SEQ ID NO: 286949 - DNA, 25 bp, probe
taagcagtggctcaaagagacccct

SEQ ID NO: 286950 - DNA, 25 bp, probe
taagcagtgctttgaaaggatccac

SEQ ID NO: 286951 - DNA, 25 bp, probe
taagcagtgctttgaaaggatccac

SEQ ID NO: 286952 - DNA, 25 bp, probe
taagcatctctgcagaaagccaaca

SEQ ID NO: 286953 - DNA, 25 bp, probe
tactgtcaccaacaaccaagctaaa

SEQ ID NO: 286954 - DNA, 25 bp, probe
tacgtcctcaattactccaacatag

SEQ ID NO: 286955 - DNA, 25 bp, probe
taacctctcaatttactaactacca

SEQ ID NO: 286956 - DNA, 25 bp, probe
taaccctgaagactccacatactat

SEQ ID NO: 286957 - DNA, 25 bp, probe
taacacctaggcctgcaaattctgc

SEQ ID NO: 286958 - DNA, 25 bp, probe
taacacctaggcctgcaaattctgc

SEQ ID NO: 286959 - DNA, 25 bp, probe
taaacgtgcagactatgcaaaccag

SEQ ID NO: 286960 - DNA, 25 bp, probe
taagaacagcagtattcctaccagg

SEQ ID NO: 286961 - DNA, 25 bp, probe
taacagggcagtatcgcttcctggc

SEQ ID NO: 286962 - DNA, 25 bp, probe
taacagggcagtatcgcttcctggc

SEQ ID NO: 286963 - DNA, 25 bp, probe
taacgctatactgtctgctgttcgg

SEQ ID NO: 286964 - DNA, 25 bp, probe
taacgctatactgtctgctgttcgg

SEQ ID NO: 286965 - DNA, 25 bp, probe
taaagctcagttgttctgttgcaag

SEQ ID NO: 286966 - DNA, 25 bp, probe
taagacaagaacattctctcataga

SEQ ID NO: 286967 - DNA, 25 bp, probe
taaacaatgccaacttctccaagga

SEQ ID NO: 286968 - DNA, 25 bp, probe
taaacaatgccaacttctccaagga

SEQ ID NO: 286969 - DNA, 25 bp, probe
taaaccagacaatttcatacttgga

SEQ ID NO: 286970 - DNA, 25 bp, probe
taaatcctgaccaatccaactctga

SEQ ID NO: 286971 - DNA, 25 bp, probe
taaatgcgctacccaccaataatga

SEQ ID NO: 286972 - DNA, 25 bp, probe
taaaccatactgtagcaacataata

SEQ ID NO: 286973 - DNA, 25 bp, probe
taaacctgcaagtaaagattcaaga

SEQ ID NO: 286974 - DNA, 25 bp, probe
taaaccatgcacctaccagtgtcag

SEQ ID NO: 286975 - DNA, 25 bp, probe
taaattcagacgtactggcttctgt

SEQ ID NO: 286976 - DNA, 25 bp, probe
taagaatcacacctgccttgttttt

SEQ ID NO: 286977 - DNA, 25 bp, probe
taaagctacacactctcgggttgtt

SEQ ID NO: 286978 - DNA, 25 bp, probe
taagcacttggaatcacgggttgaa

SEQ ID NO: 286979 - DNA, 25 bp, probe
taagactgtcataaaatggccttga

SEQ ID NO: 286980 - DNA, 25 bp, probe
taagactgtcataaaatggccttga

SEQ ID NO: 286981 - DNA, 25 bp, probe
taaactggctgattttggccttgcc

SEQ ID NO: 286982 - DNA, 25 bp, probe
taaccacctgaaagggatgattgcc

SEQ ID NO: 286983 - DNA, 25 bp, probe
taaccaagctgcaatcatggaactt

SEQ ID NO: 286984 - DNA, 25 bp, probe
taaccaggctgcgatcatggaacta

SEQ ID NO: 286985 - DNA, 25 bp, probe
taaaccctggcactggtcacaaagc

SEQ ID NO: 286986 - DNA, 25 bp, probe
tacaactccgacagggataacagct

SEQ ID NO: 286987 - DNA, 25 bp, probe
taaccctcgaaggaggacctcagct

SEQ ID NO: 286988 - DNA, 25 bp, probe
taacgccactgatggcggccgtcat

SEQ ID NO: 286989 - DNA, 25 bp, probe
taaccatgccgacgaggtctggcca

SEQ ID NO: 286990 - DNA, 25 bp, probe
taaccatgccgacgaggtctggcca

SEQ ID NO: 286991 - DNA, 25 bp, probe
taaccatgccgacgaggtctggcca

SEQ ID NO: 286992 - DNA, 25 bp, probe
taactcatgccattgctgatggtat

SEQ ID NO: 286993 - DNA, 25 bp, probe
taaccatgtgcatggacagccatat

SEQ ID NO: 286994 - DNA, 25 bp, probe
taagccatgtgttccaaggcatttt

SEQ ID NO: 286995 - DNA, 25 bp, probe
taagccatgcaaatcaaatacattt

SEQ ID NO: 286996 - DNA, 25 bp, probe
taagccatgcaaatcaaatacattt

SEQ ID NO: 286997 - DNA, 25 bp, probe
taacacatgatcctgcaattccact

SEQ ID NO: 286998 - DNA, 25 bp, probe
taagaattcctcactctgacatgac

SEQ ID NO: 286999 - DNA, 25 bp, probe
taagaattcctcactctgacatgac

SEQ ID NO: 287000 - DNA, 25 bp, probe
taagaagatcatgatgcacttagat

SEQ ID NO: 287001 - DNA, 25 bp, probe
taagaagatctaatgcatcctatat

SEQ ID NO: 287002 - DNA, 25 bp, probe
taagaacaccatagctgccaatagc

SEQ ID NO: 287003 - DNA, 25 bp, probe
taagagtgagccaagccgcagaagc

SEQ ID NO: 287004 - DNA, 25 bp, probe
taagagcctggcaaccagcaagagc

SEQ ID NO: 287005 - DNA, 25 bp, probe
tacaggtctggaaccaccgagtgct

SEQ ID NO: 287006 - DNA, 25 bp, probe
tacaggtctggaaccaccgagtgct

SEQ ID NO: 287007 - DNA, 25 bp, probe
taagctccaggagctgcaccgagct

SEQ ID NO: 287008 - DNA, 25 bp, probe
tacactaatatatggacctagcttg

SEQ ID NO: 287009 - DNA, 25 bp, probe
taccgaaatccgcaaccgtgtcgaa

SEQ ID NO: 287010 - DNA, 25 bp, probe
taccaaaacaggcgacctttcagca

SEQ ID NO: 287011 - DNA, 25 bp, probe
tacaaaggcacgcggccgtttgcca

SEQ ID NO: 287012 - DNA, 25 bp, probe
tacaaaggcacgcggccgtttgcca

SEQ ID NO: 287013 - DNA, 25 bp, probe
tacaagtatgggtggtcgtttgcct

SEQ ID NO: 287014 - DNA, 25 bp, probe
tacaactacggctggtctttttact

SEQ ID NO: 287015 - DNA, 25 bp, probe
tacaaaacaggctggtctcgtggta

SEQ ID NO: 287016 - DNA, 25 bp, probe
taaatacaaggctcgtctcaaagat

SEQ ID NO: 287017 - DNA, 25 bp, probe
taaataaaggctgctgttctaagtc

SEQ ID NO: 287018 - DNA, 25 bp, probe
taaaaattggctgggttttgagctt

SEQ ID NO: 287019 - DNA, 25 bp, probe
taagaaacgactgggttgtcatcct

SEQ ID NO: 287020 - DNA, 25 bp, probe
taagacccgagctttgattgactcc

SEQ ID NO: 287021 - DNA, 25 bp, probe
taagacttctgacgtcaactcctca

SEQ ID NO: 287022 - DNA, 25 bp, probe
taaatgttcatgtgtaacttctaga

SEQ ID NO: 287023 - DNA, 25 bp, probe
taaatgctgtagaagtgagtttgta

SEQ ID NO: 287024 - DNA, 25 bp, probe
taagagcgtgtgaaccttttgtgtt

SEQ ID NO: 287025 - DNA, 25 bp, probe
taaagaggagcagtcctatgctttt

SEQ ID NO: 287026 - DNA, 25 bp, probe
taagaaggagttctgacattcattt

SEQ ID NO: 287027 - DNA, 25 bp, probe
taagatggggtttatgtcagtcatt

SEQ ID NO: 287028 - DNA, 25 bp, probe
taagacggtgtttgcattctgcagt

SEQ ID NO: 287029 - DNA, 25 bp, probe
taagactgcctgtctcatatgtcta

SEQ ID NO: 287030 - DNA, 25 bp, probe
taaaatgcggcactatttctgaaca

SEQ ID NO: 287031 - DNA, 25 bp, probe
taaaatgcggcactatttctgaaca

SEQ ID NO: 287032 - DNA, 25 bp, probe
taaatagagtgctttttcatggaaa

SEQ ID NO: 287033 - DNA, 25 bp, probe
taaacagttggttgttctggccaac

SEQ ID NO: 287034 - DNA, 25 bp, probe
taaacctctggggttctggaccaag

SEQ ID NO: 287035 - DNA, 25 bp, probe
taaacctctggggttctggaccaag

SEQ ID NO: 287036 - DNA, 25 bp, probe
taagaactcgggttttatacaatag

SEQ ID NO: 287037 - DNA, 25 bp, probe
taaaccttgccgttttgaaactcag

SEQ ID NO: 287038 - DNA, 25 bp, probe
taaacatcttggattttcttcctcc

SEQ ID NO: 287039 - DNA, 25 bp, probe
tttaacgtggtgctgttggtccatc

SEQ ID NO: 287040 - DNA, 25 bp, probe
taagaacctggtcatgctttactcc

SEQ ID NO: 287041 - DNA, 25 bp, probe
tataaaccggtcgcctctggcagcg

SEQ ID NO: 287042 - DNA, 25 bp, probe
taaacaccgttcttcagctctaacg

SEQ ID NO: 287043 - DNA, 25 bp, probe
taagagccccaatctcacttgaaga

SEQ ID NO: 287044 - DNA, 25 bp, probe
taagagccccaatctcacttgaaga

SEQ ID NO: 287045 - DNA, 25 bp, probe
taaccacttatctcccatatgagag

SEQ ID NO: 287046 - DNA, 25 bp, probe
taagccacttcttactccagtagta

SEQ ID NO: 287047 - DNA, 25 bp, probe
taagccacttcttactccagtagta

SEQ ID NO: 287048 - DNA, 25 bp, probe
taagccacttcttactccagtagta

SEQ ID NO: 287049 - DNA, 25 bp, probe
taagccctttcatgctagcaggaag

SEQ ID NO: 287050 - DNA, 25 bp, probe
taagccctttcatgctagcaggaag

SEQ ID NO: 287051 - DNA, 25 bp, probe
taagcacttttcagagcgaggccga

SEQ ID NO: 287052 - DNA, 25 bp, probe
taagctgctttagctggggttctgt

SEQ ID NO: 287053 - DNA, 25 bp, probe
taaagatttaccctaggacctgatt

SEQ ID NO: 287054 - DNA, 25 bp, probe
taaagaaaaccggatggtgccttgt

SEQ ID NO: 287055 - DNA, 25 bp, probe
taaagaaaaccggatggtgccttgt

SEQ ID NO: 287056 - DNA, 25 bp, probe
taaaagaatatggcgtcatgcgtgt

SEQ ID NO: 287057 - DNA, 25 bp, probe
taagactcttaggcagctatgggtt

SEQ ID NO: 287058 - DNA, 25 bp, probe
taagactctgttgatgtgataattt

SEQ ID NO: 287059 - DNA, 25 bp, probe
taagcactcatgttattaaaggttt

SEQ ID NO: 287060 - DNA, 25 bp, probe
taagctctattttaactagtgtttt

SEQ ID NO: 287061 - DNA, 25 bp, probe
taagcattattattcaactggtcta

SEQ ID NO: 287062 - DNA, 25 bp, probe
taagctttaacaagacaatgtctca

SEQ ID NO: 287063 - DNA, 25 bp, probe
taaatcttaccaaaacttatgctaa

SEQ ID NO: 287064 - DNA, 25 bp, probe
taaattccacactaccacattaaaa

SEQ ID NO: 287065 - DNA, 25 bp, probe
taaaatacccaagtacattctaatt

SEQ ID NO: 287066 - DNA, 25 bp, probe
taaaatgtcctatgtatatcttcta

SEQ ID NO: 287067 - DNA, 25 bp, probe
taacctgtattagtgtagatcgatt

SEQ ID NO: 287068 - DNA, 25 bp, probe
taagccataatctcttagtggattg

SEQ ID NO: 287069 - DNA, 25 bp, probe
taagccataatctcttagtggattg

SEQ ID NO: 287070 - DNA, 25 bp, probe
taagcatcaaactcttagttactca

SEQ ID NO: 287071 - DNA, 25 bp, probe
taacatccgactctgtagtgtccca

SEQ ID NO: 287072 - DNA, 25 bp, probe
tacactccatttgctaatggcccca

SEQ ID NO: 287073 - DNA, 25 bp, probe
taacagccctagatcgatagcccta

SEQ ID NO: 287074 - DNA, 25 bp, probe
taagcgctccttcttgaagctcatt

SEQ ID NO: 287075 - DNA, 25 bp, probe
taagcctccttgttttgatgtcacc

SEQ ID NO: 287076 - DNA, 25 bp, probe
taagccttttgtttggatctactgt

SEQ ID NO: 287077 - DNA, 25 bp, probe
taactattttgtctgccatgtcatt

SEQ ID NO: 287078 - DNA, 25 bp, probe
taaaggtaggtgcatgccttcataa

SEQ ID NO: 287079 - DNA, 25 bp, probe
taaagaaatgtggccatgctttaaa

SEQ ID NO: 287080 - DNA, 25 bp, probe
taaagtaatttccatatcctagatg

SEQ ID NO: 287081 - DNA, 25 bp, probe
taaaggaacttcgtcatccaaatat

SEQ ID NO: 287082 - DNA, 25 bp, probe
taaatggaacttctgcaaggcagta

SEQ ID NO: 287083 - DNA, 25 bp, probe
taacaggaactgaggcgatagaatt

SEQ ID NO: 287084 - DNA, 25 bp, probe
taacaggaactgaggcgatagaatt

SEQ ID NO: 287085 - DNA, 25 bp, probe
taagcaggacaaatcccggctgaat

SEQ ID NO: 287086 - DNA, 25 bp, probe
taaaggagaataccacagagctcca

SEQ ID NO: 287087 - DNA, 25 bp, probe
taaaagacaatactcttgtgttaca

SEQ ID NO: 287088 - DNA, 25 bp, probe
taacaagatcattatcttcatgttt

SEQ ID NO: 287089 - DNA, 25 bp, probe
tacagctgtcataagatcataattt

SEQ ID NO: 287090 - DNA, 25 bp, probe
taagctacttgaacacagcttcatc

SEQ ID NO: 287091 - DNA, 25 bp, probe
taagctacttgaacacagcttcatc

SEQ ID NO: 287092 - DNA, 25 bp, probe
taagctacttgaacacagcttcatc

SEQ ID NO: 287093 - DNA, 25 bp, probe
taagcttcttgtcattcttcattgc

SEQ ID NO: 287094 - DNA, 25 bp, probe
taaccgtgcttctttcatgtcaggc

SEQ ID NO: 287095 - DNA, 25 bp, probe
tacccggttcagcctggctcggcaa

SEQ ID NO: 287096 - DNA, 25 bp, probe
taaacaggttacccagctgggagag

SEQ ID NO: 287097 - DNA, 25 bp, probe
taagcaaggtttcctgccgggagaa

SEQ ID NO: 287098 - DNA, 25 bp, probe
taaagggctgttttgccatggaaaa

SEQ ID NO: 287099 - DNA, 25 bp, probe
taaaactgctgttagctttgtaaat

SEQ ID NO: 287100 - DNA, 25 bp, probe
tagaacctgggctacattcctaact

SEQ ID NO: 287101 - DNA, 25 bp, probe
tagaacctgggctacattcctaact

SEQ ID NO: 287102 - DNA, 25 bp, probe
tagaaggcggagaagttcccagagg

SEQ ID NO: 287103 - DNA, 25 bp, probe
tacaggaggggaaggggccagggag

SEQ ID NO: 287104 - DNA, 25 bp, probe
tacaggaggggaaggggccagggag

SEQ ID NO: 287105 - DNA, 25 bp, probe
tacttggctcggagcgggcgagggg

SEQ ID NO: 287106 - DNA, 25 bp, probe
taactggcgggcacagggtcaggtg

SEQ ID NO: 287107 - DNA, 25 bp, probe
taaatatgcaggccttcgtggctcg

SEQ ID NO: 287108 - DNA, 25 bp, probe
taagcactcaggcctacgtgggccg

SEQ ID NO: 287109 - DNA, 25 bp, probe
taaactatgtgcaaacaggagggag

SEQ ID NO: 287110 - DNA, 25 bp, probe
taagcactatttgatcataatggga

SEQ ID NO: 287111 - DNA, 25 bp, probe
taagcactatttgatcataatggga

SEQ ID NO: 287112 - DNA, 25 bp, probe
taacatgcatctttggacatcaatg

SEQ ID NO: 287113 - DNA, 25 bp, probe
taagctatgcttagtgccaatagta

SEQ ID NO: 287114 - DNA, 25 bp, probe
taagctagttgggccacaactgtca

SEQ ID NO: 287115 - DNA, 25 bp, probe
taagctcttcatgcgtacaacagtt

SEQ ID NO: 287116 - DNA, 25 bp, probe
taacttctcaggacatccaacattt

SEQ ID NO: 287117 - DNA, 25 bp, probe
taacttgtcagtgtctgtattttct

SEQ ID NO: 287118 - DNA, 25 bp, probe
taacttgtcagtgtctgtattttct

SEQ ID NO: 287119 - DNA, 25 bp, probe
taagcctgttgtgactttgcttttg

SEQ ID NO: 287120 - DNA, 25 bp, probe
taacctgatggtttgcatttgctgt

SEQ ID NO: 287121 - DNA, 25 bp, probe
taaagtctggtgcctcatttgatct

SEQ ID NO: 287122 - DNA, 25 bp, probe
tactacattgggatcagcatcgact

SEQ ID NO: 287123 - DNA, 25 bp, probe
tacaatattggggacaccaactgtc

SEQ ID NO: 287124 - DNA, 25 bp, probe
taacatactgcgcaacaagccctac

SEQ ID NO: 287125 - DNA, 25 bp, probe
taagctcatccaccaagaagcctgc

SEQ ID NO: 287126 - DNA, 25 bp, probe
taagctcatccaccaagaagcctgc

SEQ ID NO: 287127 - DNA, 25 bp, probe
taactaccatcagcacaactctgca

SEQ ID NO: 287128 - DNA, 25 bp, probe
taaccagtctcagcaagacatccta

SEQ ID NO: 287129 - DNA, 25 bp, probe
taagcggatatcggggacatccata

SEQ ID NO: 287130 - DNA, 25 bp, probe
tacagggcacttgagaagtccttct

SEQ ID NO: 287131 - DNA, 25 bp, probe
tacacggccccaataaagcctgctc

SEQ ID NO: 287132 - DNA, 25 bp, probe
taccgttttcatgaaagttctcagt

SEQ ID NO: 287133 - DNA, 25 bp, probe
taccgttttcatgaaagttctcagt

SEQ ID NO: 287134 - DNA, 25 bp, probe
ttcccttttcagaaagtccttagtg

SEQ ID NO: 287135 - DNA, 25 bp, probe
ttcccttcccaatcctacaaaggag

SEQ ID NO: 287136 - DNA, 25 bp, probe
ttcccttcccaatcctacaaaggag

SEQ ID NO: 287137 - DNA, 25 bp, probe
tttatggtcccatacttcctaagga

SEQ ID NO: 287138 - DNA, 25 bp, probe
tttaatggcacctcatttggctttg

SEQ ID NO: 287139 - DNA, 25 bp, probe
tttaatggcacctcatttggctttg

SEQ ID NO: 287140 - DNA, 25 bp, probe
ttaactggacctgagtaggcctggt

SEQ ID NO: 287141 - DNA, 25 bp, probe
ttctacttatcctcattacccaggt

SEQ ID NO: 287142 - DNA, 25 bp, probe
tagtacttagcctacctagaccagc

SEQ ID NO: 287143 - DNA, 25 bp, probe
taaactgtagctgtattagcagcaa

SEQ ID NO: 287144 - DNA, 25 bp, probe
taaactgattctttattcacaaatt

SEQ ID NO: 287145 - DNA, 25 bp, probe
taaactgattctttattcacaaatt

SEQ ID NO: 287146 - DNA, 25 bp, probe
taaataatctctgtaccaaatagta

SEQ ID NO: 287147 - DNA, 25 bp, probe
taaaactctttatcccatcttgatt

SEQ ID NO: 287148 - DNA, 25 bp, probe
tacaaatatttttaggactcacgtt

SEQ ID NO: 287149 - DNA, 25 bp, probe
taaagttgcatctaaagtaccacag

SEQ ID NO: 287150 - DNA, 25 bp, probe
taaagttgcatctaaagtaccacag

SEQ ID NO: 287151 - DNA, 25 bp, probe
taacaacatcactacaagtataaga

SEQ ID NO: 287152 - DNA, 25 bp, probe
taaagacatcagttcattggtcaaa

SEQ ID NO: 287153 - DNA, 25 bp, probe
taaagacatcagttcattggtcaaa

SEQ ID NO: 287154 - DNA, 25 bp, probe
taaaaaagattgaagatgcatccaa

SEQ ID NO: 287155 - DNA, 25 bp, probe
taaaaatagctgctaatctgtcaac

SEQ ID NO: 287156 - DNA, 25 bp, probe
taagcttgttggcctagactgctca

SEQ ID NO: 287157 - DNA, 25 bp, probe
taagctttgcttactgatacatggc

SEQ ID NO: 287158 - DNA, 25 bp, probe
taacctctgcactactgacatgtgg

SEQ ID NO: 287159 - DNA, 25 bp, probe
taacctctgcactactgacatgtgg

SEQ ID NO: 287160 - DNA, 25 bp, probe
taacctcagcacactcacatgctgc

SEQ ID NO: 287161 - DNA, 25 bp, probe
taacatcgaagcatctgaatcatgt

SEQ ID NO: 287162 - DNA, 25 bp, probe
taacagatgatccatttgaacagtt

SEQ ID NO: 287163 - DNA, 25 bp, probe
taacagacatgcagcttggaggttc

SEQ ID NO: 287164 - DNA, 25 bp, probe
taacgtcatgcatgttggactgagg

SEQ ID NO: 287165 - DNA, 25 bp, probe
taacacctcattctggccgagagta

SEQ ID NO: 287166 - DNA, 25 bp, probe
taactgcctggtcagtgcccagaga

SEQ ID NO: 287167 - DNA, 25 bp, probe
tagaccatctggaccagtagcccat

SEQ ID NO: 287168 - DNA, 25 bp, probe
taacctctagagtcactgatacaca

SEQ ID NO: 287169 - DNA, 25 bp, probe
taacctgcttgggtatgcagcagcc

SEQ ID NO: 287170 - DNA, 25 bp, probe
taacctgcttgggtatgcagcagcc

SEQ ID NO: 287171 - DNA, 25 bp, probe
taacctgcgtgctttataagcctct

SEQ ID NO: 287172 - DNA, 25 bp, probe
taaccctgtctaatgaaacctgtgt

SEQ ID NO: 287173 - DNA, 25 bp, probe
taaaactgaatgagcaaggcctctt

SEQ ID NO: 287174 - DNA, 25 bp, probe
tacaaactgaagtgcaaggcactgc

SEQ ID NO: 287175 - DNA, 25 bp, probe
taaacactgagggggaagacagcca

SEQ ID NO: 287176 - DNA, 25 bp, probe
taaagactgtgggaccaggacccta

SEQ ID NO: 287177 - DNA, 25 bp, probe
taaagtcagtgaggcccttggccaa

SEQ ID NO: 287178 - DNA, 25 bp, probe
taaagtcagtgaggcccttggccaa

SEQ ID NO: 287179 - DNA, 25 bp, probe
taaagtcagtgaggcccttggccaa

SEQ ID NO: 287180 - DNA, 25 bp, probe
taaagccagcgggtccctagtctta

SEQ ID NO: 287181 - DNA, 25 bp, probe
tacaaccccgttatctatgtcttta

SEQ ID NO: 287182 - DNA, 25 bp, probe
tacaacacgccggactgactctggc

SEQ ID NO: 287183 - DNA, 25 bp, probe
taaaaacctcaggtggctctgcctt

SEQ ID NO: 287184 - DNA, 25 bp, probe
taaaaacctcaggtggctctgcctt

SEQ ID NO: 287185 - DNA, 25 bp, probe
taaaaacctcaggtggctctgcctt

SEQ ID NO: 287186 - DNA, 25 bp, probe
tacgaagaccctctgagatgctaca

SEQ ID NO: 287187 - DNA, 25 bp, probe
tacagagcagacagttaagagaaat

SEQ ID NO: 287188 - DNA, 25 bp, probe
taaacagacaggctacggatggata

SEQ ID NO: 287189 - DNA, 25 bp, probe
taaaagacacatccccaggtggcca

SEQ ID NO: 287190 - DNA, 25 bp, probe
taacgatgaccacccagagttcagg

SEQ ID NO: 287191 - DNA, 25 bp, probe
taaagatggctctggcaagctgggg

SEQ ID NO: 287192 - DNA, 25 bp, probe
taaagcggcgtgagcagcagctggc

SEQ ID NO: 287193 - DNA, 25 bp, probe
tacaactggcgtctcaacaacgtca

SEQ ID NO: 287194 - DNA, 25 bp, probe
tacaactggcgtctcaacaacgtca

SEQ ID NO: 287195 - DNA, 25 bp, probe
taaaaacgtcgcacatgcagacgta

SEQ ID NO: 287196 - DNA, 25 bp, probe
taaaaacgtcgcacatgcagacgta

SEQ ID NO: 287197 - DNA, 25 bp, probe
taaaagaaggccgcgcagccacggc

SEQ ID NO: 287198 - DNA, 25 bp, probe
taaaatggatggcccccgaaagcct

SEQ ID NO: 287199 - DNA, 25 bp, probe
taggatatattcagaccctaaagcc

SEQ ID NO: 287200 - DNA, 25 bp, probe
taaaaatcttgaaccttagaatcta

SEQ ID NO: 287201 - DNA, 25 bp, probe
tacaaaacttgtaaccattgaacca

SEQ ID NO: 287202 - DNA, 25 bp, probe
tacaaagtttgatcacctgcctgca

SEQ ID NO: 287203 - DNA, 25 bp, probe
taaaagtcttctgagagctcctgag

SEQ ID NO: 287204 - DNA, 25 bp, probe
taaaagtcttctgagagctcctgag

SEQ ID NO: 287205 - DNA, 25 bp, probe
taaaggtctttgcacatgtgaccac

SEQ ID NO: 287206 - DNA, 25 bp, probe
taaaggtctggtcatctgagctcac

SEQ ID NO: 287207 - DNA, 25 bp, probe
taaagtgtgatcattactggccagc

SEQ ID NO: 287208 - DNA, 25 bp, probe
taaactgcagtcacgttggcctgaa

SEQ ID NO: 287209 - DNA, 25 bp, probe
taaaccggtcgcctctggcagcgaa

SEQ ID NO: 287210 - DNA, 25 bp, probe
taacactttccagcctatagcagaa

SEQ ID NO: 287211 - DNA, 25 bp, probe
taactttaccatgctcaatgaaaag

SEQ ID NO: 287212 - DNA, 25 bp, probe
taaatctgtgatgatcctcatatgg

SEQ ID NO: 287213 - DNA, 25 bp, probe
taaacagtagcttagcatcagaggt

SEQ ID NO: 287214 - DNA, 25 bp, probe
taagccagtacgtctgagctgagta

SEQ ID NO: 287215 - DNA, 25 bp, probe
taaccagtcactattgatggacatt

SEQ ID NO: 287216 - DNA, 25 bp, probe
taaccagtcactattgatggacatt

SEQ ID NO: 287217 - DNA, 25 bp, probe
taaccgtgccatcttgcaaactaca

SEQ ID NO: 287218 - DNA, 25 bp, probe
taactcggtcattgctgttgaaaaa

SEQ ID NO: 287219 - DNA, 25 bp, probe
taactgggatgatctcattaataag

SEQ ID NO: 287220 - DNA, 25 bp, probe
taactgcacgatattcagatttcgg

SEQ ID NO: 287221 - DNA, 25 bp, probe
taacccagagacttcagtgtcctga

SEQ ID NO: 287222 - DNA, 25 bp, probe
taaccaaaggtaggtgtccatgcag

SEQ ID NO: 287223 - DNA, 25 bp, probe
tactacaacaagcagcgcgtcctgg

SEQ ID NO: 287224 - DNA, 25 bp, probe
taaaagcgcacacaatcttcctgga

SEQ ID NO: 287225 - DNA, 25 bp, probe
taaacaaactctcatttgactgtga

SEQ ID NO: 287226 - DNA, 25 bp, probe
tacaaaaagccacatagtttttcca

SEQ ID NO: 287227 - DNA, 25 bp, probe
tacaacagaccccaacagtactttc

SEQ ID NO: 287228 - DNA, 25 bp, probe
tacaacagaccccaacagtactttc

SEQ ID NO: 287229 - DNA, 25 bp, probe
tacaacagaccccaacagtactttc

SEQ ID NO: 287230 - DNA, 25 bp, probe
taaataagctctccccaaacttgct

SEQ ID NO: 287231 - DNA, 25 bp, probe
taaataagctctccccaaacttgct

SEQ ID NO: 287232 - DNA, 25 bp, probe
taaaagagagctgcccacaacttgc

SEQ ID NO: 287233 - DNA, 25 bp, probe
taaaagagagctgcccacaacttgc

SEQ ID NO: 287234 - DNA, 25 bp, probe
taaaatggcactgaaccaattttca

SEQ ID NO: 287235 - DNA, 25 bp, probe
tacactttcaatcaacactttttca

SEQ ID NO: 287236 - DNA, 25 bp, probe
taactgttcacaaaacgtttttcat

SEQ ID NO: 287237 - DNA, 25 bp, probe
taaatgttcccttgaagtatttatt

SEQ ID NO: 287238 - DNA, 25 bp, probe
taaaggctccttggaacttctcttg

SEQ ID NO: 287239 - DNA, 25 bp, probe
taaatgacctgcatcaagtcttctg

SEQ ID NO: 287240 - DNA, 25 bp, probe
taaatatgcccctggctcttttcta

SEQ ID NO: 287241 - DNA, 25 bp, probe
taaccagaatccaaggtatttttat

SEQ ID NO: 287242 - DNA, 25 bp, probe
taacaagaaacggggaatctccaat

SEQ ID NO: 287243 - DNA, 25 bp, probe
taaaagcaaacacaggattcaccac

SEQ ID NO: 287244 - DNA, 25 bp, probe
taaaagcaaacacaggattcaccac

SEQ ID NO: 287245 - DNA, 25 bp, probe
tacacacagaaatctttagtactca

SEQ ID NO: 287246 - DNA, 25 bp, probe
taaataacttaccagtaaactcact

SEQ ID NO: 287247 - DNA, 25 bp, probe
taaataacttaccagtaaactcact

SEQ ID NO: 287248 - DNA, 25 bp, probe
tacaagaacctcacgctcaaattcc

SEQ ID NO: 287249 - DNA, 25 bp, probe
taaagagaccactctgtgccaagtc

SEQ ID NO: 287250 - DNA, 25 bp, probe
taaagaatccagagttgctacaata

SEQ ID NO: 287251 - DNA, 25 bp, probe
taaaccctgcagtgttaaacagagg

SEQ ID NO: 287252 - DNA, 25 bp, probe
taaacagcctccagtcataaaaatg

SEQ ID NO: 287253 - DNA, 25 bp, probe
taaacagcctccagtcataaaaatg

SEQ ID NO: 287254 - DNA, 25 bp, probe
taaaaccttctctccagcacaaagg

SEQ ID NO: 287255 - DNA, 25 bp, probe
taaaactctatcaggtcccaaaagg

SEQ ID NO: 287256 - DNA, 25 bp, probe
taaaatattagcaagcgccccaaac

SEQ ID NO: 287257 - DNA, 25 bp, probe
taaaagcaaagagggctcccagaac

SEQ ID NO: 287258 - DNA, 25 bp, probe
taaattaagcagatagtcaaagaac

SEQ ID NO: 287259 - DNA, 25 bp, probe
taaatggaaggcaaagcatcacatg

SEQ ID NO: 287260 - DNA, 25 bp, probe
taaagaggatcgaccagtcagagtt

SEQ ID NO: 287261 - DNA, 25 bp, probe
taaaagaaccaccagatctgcttca

SEQ ID NO: 287262 - DNA, 25 bp, probe
taaaggccaccttaatctcttctaa

SEQ ID NO: 287263 - DNA, 25 bp, probe
taaagaggaccgtttctgttgcaaa

SEQ ID NO: 287264 - DNA, 25 bp, probe
taaagggaactgtgacatttcaagc

SEQ ID NO: 287265 - DNA, 25 bp, probe
tataaaaaatggtgcctgattcggc

SEQ ID NO: 287266 - DNA, 25 bp, probe
ttccaaacctggtgtctatccggca

SEQ ID NO: 287267 - DNA, 25 bp, probe
ttcaagaagggggaatgctgtcggg

SEQ ID NO: 287268 - DNA, 25 bp, probe
ttagtacgtgttcttctgtcagggc

SEQ ID NO: 287269 - DNA, 25 bp, probe
tatacccggttcagcctggctcggc

SEQ ID NO: 287270 - DNA, 25 bp, probe
taacatcattgggatccccatcccg

SEQ ID NO: 287271 - DNA, 25 bp, probe
taacatcattgggatccccatcccg

SEQ ID NO: 287272 - DNA, 25 bp, probe
taacaatgtggcccacggcatcgtc

SEQ ID NO: 287273 - DNA, 25 bp, probe
taaaatgaggctccaatacatggga

SEQ ID NO: 287274 - DNA, 25 bp, probe
taacaaaggcatcgcccacagggac

SEQ ID NO: 287275 - DNA, 25 bp, probe
taacaagcagctcgagtccataggc

SEQ ID NO: 287276 - DNA, 25 bp, probe
taaagacaccattggcctgacgcag

SEQ ID NO: 287277 - DNA, 25 bp, probe
ttcacgaaccaagcctatgccattg

SEQ ID NO: 287278 - DNA, 25 bp, probe
taactagcaccagggactatgaatg

SEQ ID NO: 287279 - DNA, 25 bp, probe
taactacactgcatggcctgatcat

SEQ ID NO: 287280 - DNA, 25 bp, probe
taacgtggctgccggctatgacatc

SEQ ID NO: 287281 - DNA, 25 bp, probe
tacaagcggctgccagccactgaca

SEQ ID NO: 287282 - DNA, 25 bp, probe
tacacggtgacttccgtgtcctgtt

SEQ ID NO: 287283 - DNA, 25 bp, probe
taacctgtttgcaattgtcccattt

SEQ ID NO: 287284 - DNA, 25 bp, probe
tacactctgtcatcttttaccattg

SEQ ID NO: 287285 - DNA, 25 bp, probe
tacactctgtcatcttttaccattg

SEQ ID NO: 287286 - DNA, 25 bp, probe
taacctgcataactttttgtcttta

SEQ ID NO: 287287 - DNA, 25 bp, probe
taacactctagctattcttcgtcgt

SEQ ID NO: 287288 - DNA, 25 bp, probe
taacctgtagcaaccttctgcattc

SEQ ID NO: 287289 - DNA, 25 bp, probe
taactgttagttatgcctgcattca

SEQ ID NO: 287290 - DNA, 25 bp, probe
taactgttgcacttttgaatgtcca

SEQ ID NO: 287291 - DNA, 25 bp, probe
taactgttcacaaattctctgtccc

SEQ ID NO: 287292 - DNA, 25 bp, probe
taaattcattcacgagtgccggctc

SEQ ID NO: 287293 - DNA, 25 bp, probe
taaattcattcacgagtgccggctc

SEQ ID NO: 287294 - DNA, 25 bp, probe
taaattcattcacgagtgccggctc

SEQ ID NO: 287295 - DNA, 25 bp, probe
tacacattcttctgtggcagttatc

SEQ ID NO: 287296 - DNA, 25 bp, probe
taaagatctgtctgaagcagcttca

SEQ ID NO: 287297 - DNA, 25 bp, probe
taaagatgtcatccgattgctggaa

SEQ ID NO: 287298 - DNA, 25 bp, probe
tacaagtgtcctggcatgggtaaca

SEQ ID NO: 287299 - DNA, 25 bp, probe
taactgcttcttggagctttggaat

SEQ ID NO: 287300 - DNA, 25 bp, probe
taactgcttcttggagctttggaat

SEQ ID NO: 287301 - DNA, 25 bp, probe
tactgacctacttgactttggagaa

SEQ ID NO: 287302 - DNA, 25 bp, probe
tactgacctacttgactttggagaa

SEQ ID NO: 287303 - DNA, 25 bp, probe
taaactcaactatctcttgggaaga

SEQ ID NO: 287304 - DNA, 25 bp, probe
taaactaccttagctgcatagtgga

SEQ ID NO: 287305 - DNA, 25 bp, probe
taactgctatcctttaccagagttg

SEQ ID NO: 287306 - DNA, 25 bp, probe
taaatttctgcatctcacacgactt

SEQ ID NO: 287307 - DNA, 25 bp, probe
tacaactgttacttacactgactgg

SEQ ID NO: 287308 - DNA, 25 bp, probe
taaaggattaccccatatacatgtg

SEQ ID NO: 287309 - DNA, 25 bp, probe
taaaggattaccccatatacatgtg

SEQ ID NO: 287310 - DNA, 25 bp, probe
taaaggattaccatcgaccttctgt

SEQ ID NO: 287311 - DNA, 25 bp, probe
taaagtgttacattggtacctgttg

SEQ ID NO: 287312 - DNA, 25 bp, probe
taaagtgttacattggtacctgttg

SEQ ID NO: 287313 - DNA, 25 bp, probe
taacagtttcatctgttcacatttt

SEQ ID NO: 287314 - DNA, 25 bp, probe
taaatggcttctttgttactactat

SEQ ID NO: 287315 - DNA, 25 bp, probe
tagagtccttccctgtaacattgga

SEQ ID NO: 287316 - DNA, 25 bp, probe
taaacgtgtcccatgaatcttgtca

SEQ ID NO: 287317 - DNA, 25 bp, probe
tacatacttgtccctctaagtcatt

SEQ ID NO: 287318 - DNA, 25 bp, probe
tacactttgtgtcctgctgcaatgt

SEQ ID NO: 287319 - DNA, 25 bp, probe
taactctttgaggattgatctgtca

SEQ ID NO: 287320 - DNA, 25 bp, probe
taacagcctggaggtgttcttcaat

SEQ ID NO: 287321 - DNA, 25 bp, probe
taacagcgtgggggtgctcttcaat

SEQ ID NO: 287322 - DNA, 25 bp, probe
taacagggtatgctgcctctgtaaa

SEQ ID NO: 287323 - DNA, 25 bp, probe
taacaggtctgtgatgcccttagat

SEQ ID NO: 287324 - DNA, 25 bp, probe
tacacaggcctgataactctgtacg

SEQ ID NO: 287325 - DNA, 25 bp, probe
taaaggtcatgaaaggtgttgccca

SEQ ID NO: 287326 - DNA, 25 bp, probe
taacaggatctatcaatgttctcct

SEQ ID NO: 287327 - DNA, 25 bp, probe
taaagagttgtatatgtccacctaa

SEQ ID NO: 287328 - DNA, 25 bp, probe
tagaacatcacgcaaatgtccacgc

SEQ ID NO: 287329 - DNA, 25 bp, probe
taaaacactggagtatgcttcacct

SEQ ID NO: 287330 - DNA, 25 bp, probe
taaacagcattggaccagttgatcc

SEQ ID NO: 287331 - DNA, 25 bp, probe
taactgcacagagggctacttcatg

SEQ ID NO: 287332 - DNA, 25 bp, probe
taactccatgtctctgagcattaga

SEQ ID NO: 287333 - DNA, 25 bp, probe
tactggccattcacggaagaaccta

SEQ ID NO: 287334 - DNA, 25 bp, probe
tacatacctttagtggaaaatcctt

SEQ ID NO: 287335 - DNA, 25 bp, probe
taaaccttttcatgcaaaagttgaa

SEQ ID NO: 287336 - DNA, 25 bp, probe
taaacctatttctgactgcagggag

SEQ ID NO: 287337 - DNA, 25 bp, probe
taaaattatttctgtgctgatgcta

SEQ ID NO: 287338 - DNA, 25 bp, probe
taaatgtttttgtatgactgtgtta

SEQ ID NO: 287339 - DNA, 25 bp, probe
taaatgtgttttccttcggcttgtt

SEQ ID NO: 287340 - DNA, 25 bp, probe
taaatgatttaaccattgccctctc

SEQ ID NO: 287341 - DNA, 25 bp, probe
taaagtgtacaaccctagcctgata

SEQ ID NO: 287342 - DNA, 25 bp, probe
taaagtgtacaaccctagcctgata

SEQ ID NO: 287343 - DNA, 25 bp, probe
taaagtaaataatgccagcctgatt

SEQ ID NO: 287344 - DNA, 25 bp, probe
taacattaaacaaaccccagatcaa

SEQ ID NO: 287345 - DNA, 25 bp, probe
taaaataaaagtccacccagtgctg

SEQ ID NO: 287346 - DNA, 25 bp, probe
ttaccattataaccctacagaggtg

SEQ ID NO: 287347 - DNA, 25 bp, probe
tttcttttaaataatcagcgggtgt

SEQ ID NO: 287348 - DNA, 25 bp, probe
tatttctgttaatatttaccggtag

SEQ ID NO: 287349 - DNA, 25 bp, probe
ttttgtactatatgacttacgggaa

SEQ ID NO: 287350 - DNA, 25 bp, probe
tattttgactaattacttaagagga

SEQ ID NO: 287351 - DNA, 25 bp, probe
taactagcactttataagccaatga

SEQ ID NO: 287352 - DNA, 25 bp, probe
taaatgacagtgaattgacccatgt

SEQ ID NO: 287353 - DNA, 25 bp, probe
taaatactgtggttgcctctatgtg

SEQ ID NO: 287354 - DNA, 25 bp, probe
taaaccaggatactccctgcatgat

SEQ ID NO: 287355 - DNA, 25 bp, probe
taaaccaggatactccctgcatgat

SEQ ID NO: 287356 - DNA, 25 bp, probe
taaaccagctaactttctgatagtt

SEQ ID NO: 287357 - DNA, 25 bp, probe
taaacacctgcatatttttatgtaa

SEQ ID NO: 287358 - DNA, 25 bp, probe
taaaaccatcaccatttgaatttca

SEQ ID NO: 287359 - DNA, 25 bp, probe
taacattccaatgaactagcattta

SEQ ID NO: 287360 - DNA, 25 bp, probe
taacattccaatgaactagcattta

SEQ ID NO: 287361 - DNA, 25 bp, probe
taacttcctccatacataagcttca

SEQ ID NO: 287362 - DNA, 25 bp, probe
taacttcctctatttcacacagaaa

SEQ ID NO: 287363 - DNA, 25 bp, probe
tatacttccctatgatgctacaaga

SEQ ID NO: 287364 - DNA, 25 bp, probe
tagaattcacctaagtccaaaggaa

SEQ ID NO: 287365 - DNA, 25 bp, probe
taaaacccttgagcacaacagcaaa

SEQ ID NO: 287366 - DNA, 25 bp, probe
taaaaccactggacagagggccaga

SEQ ID NO: 287367 - DNA, 25 bp, probe
taacaaccctggaagagtccactgc

SEQ ID NO: 287368 - DNA, 25 bp, probe
taaacacaccggagaagaaccattt

SEQ ID NO: 287369 - DNA, 25 bp, probe
taaaccacatgctaaagaacaacgt

SEQ ID NO: 287370 - DNA, 25 bp, probe
taaatctcttgctgaacaaagacag

SEQ ID NO: 287371 - DNA, 25 bp, probe
taaatctcttgctgaacaaagacag

SEQ ID NO: 287372 - DNA, 25 bp, probe
taaattgctccattacatacaaaga

SEQ ID NO: 287373 - DNA, 25 bp, probe
taaaggtctgatgatcacacacaaa

SEQ ID NO: 287374 - DNA, 25 bp, probe
taaaggtctgatgatcacacacaaa

SEQ ID NO: 287375 - DNA, 25 bp, probe
taaaggagtagaataccaaatgata

SEQ ID NO: 287376 - DNA, 25 bp, probe
taacaacattatctgaccaatagta

SEQ ID NO: 287377 - DNA, 25 bp, probe
taacagtcatattaatgcatccaat

SEQ ID NO: 287378 - DNA, 25 bp, probe
taactgtcttgctttcatggaatag

SEQ ID NO: 287379 - DNA, 25 bp, probe
tacacaggtgcccgtcatggaagag

SEQ ID NO: 287380 - DNA, 25 bp, probe
tacagctaggccgcatgctggaagc

SEQ ID NO: 287381 - DNA, 25 bp, probe
tacagcaaggtccctgtgtatacat

SEQ ID NO: 287382 - DNA, 25 bp, probe
tacagaagaggccatgtgtctcaga

SEQ ID NO: 287383 - DNA, 25 bp, probe
tacagcagcatggagtcagtcctcg

SEQ ID NO: 287384 - DNA, 25 bp, probe
taacagcatgggggactcggactgc

SEQ ID NO: 287385 - DNA, 25 bp, probe
tacaattggtagccgctgcggagcc

SEQ ID NO: 287386 - DNA, 25 bp, probe
taacattatgtggccctctggatcc

SEQ ID NO: 287387 - DNA, 25 bp, probe
taacatgtttcagctcattccatcc

SEQ ID NO: 287388 - DNA, 25 bp, probe
tatcaaacttcagctgtacctgccc

SEQ ID NO: 287389 - DNA, 25 bp, probe
tacaggacttaggattactcattag

SEQ ID NO: 287390 - DNA, 25 bp, probe
taaaaattattcaagcactcttaaa

SEQ ID NO: 287391 - DNA, 25 bp, probe
taaaaattattcaagcactcttaaa

SEQ ID NO: 287392 - DNA, 25 bp, probe
taaaagatgttcaatacactgtttg

SEQ ID NO: 287393 - DNA, 25 bp, probe
taaaagatgttcaatacactgtttg

SEQ ID NO: 287394 - DNA, 25 bp, probe
taaactcattccatatgcatctgtg

SEQ ID NO: 287395 - DNA, 25 bp, probe
taaactcatcagggacatgtcaggg

SEQ ID NO: 287396 - DNA, 25 bp, probe
tacaagtatatggggcactgggcag

SEQ ID NO: 287397 - DNA, 25 bp, probe
tacaagtatatggggcactgggcag

SEQ ID NO: 287398 - DNA, 25 bp, probe
taacaaacatcactgccactgtggc

SEQ ID NO: 287399 - DNA, 25 bp, probe
taaaaatatcgttcactgtgacctc

SEQ ID NO: 287400 - DNA, 25 bp, probe
taacaccttcagtagcgtggctcct

SEQ ID NO: 287401 - DNA, 25 bp, probe
taaactttcaaagtctgtctcctcc

SEQ ID NO: 287402 - DNA, 25 bp, probe
tacaaaatgtcaaaccagcttcccg

SEQ ID NO: 287403 - DNA, 25 bp, probe
tagaaataataactggacttccagc

SEQ ID NO: 287404 - DNA, 25 bp, probe
taaacacaatcatggtgcctaccag

SEQ ID NO: 287405 - DNA, 25 bp, probe
taaaatcagacatgtgagcactacg

SEQ ID NO: 287406 - DNA, 25 bp, probe
tacagatttgaatagcagcattagt

SEQ ID NO: 287407 - DNA, 25 bp, probe
tacatgctttgtgagacgattggag

SEQ ID NO: 287408 - DNA, 25 bp, probe
tacagtcttgtggaaaaggtgggaa

SEQ ID NO: 287409 - DNA, 25 bp, probe
tacagtttcgtagcatgagtttaaa

SEQ ID NO: 287410 - DNA, 25 bp, probe
taaattttatcagagagttgcaaaa

SEQ ID NO: 287411 - DNA, 25 bp, probe
taacttgaattatagttctcaacaa

SEQ ID NO: 287412 - DNA, 25 bp, probe
taacttctactgtgatgttccccaa

SEQ ID NO: 287413 - DNA, 25 bp, probe
taacttctactgtgatgttccccaa

SEQ ID NO: 287414 - DNA, 25 bp, probe
taacattcaatgtttcagttaacct

SEQ ID NO: 287415 - DNA, 25 bp, probe
taacttcactgtattctttacttta

SEQ ID NO: 287416 - DNA, 25 bp, probe
taaagtatctgtattgcattaaata

SEQ ID NO: 287417 - DNA, 25 bp, probe
taaagcattgcttttattttgaaaa

SEQ ID NO: 287418 - DNA, 25 bp, probe
taaagcatagctaggtcatttggaa

SEQ ID NO: 287419 - DNA, 25 bp, probe
taaactcagcaaagtctggcgtgat

SEQ ID NO: 287420 - DNA, 25 bp, probe
taacatctaaacctgccacggatcg

SEQ ID NO: 287421 - DNA, 25 bp, probe
taacatctaaacctgccacggatcg

SEQ ID NO: 287422 - DNA, 25 bp, probe
taaacaaaacttgcatgcagcagct

SEQ ID NO: 287423 - DNA, 25 bp, probe
taaagctgaaaatcgcatggcgctc

SEQ ID NO: 287424 - DNA, 25 bp, probe
taacagtaacaatctgagttccatt

SEQ ID NO: 287425 - DNA, 25 bp, probe
taacttcaacttaaaattagcatct

SEQ ID NO: 287426 - DNA, 25 bp, probe
taacttcaacttaaaattagcatct

SEQ ID NO: 287427 - DNA, 25 bp, probe
taacttacactttatagcatttatc

SEQ ID NO: 287428 - DNA, 25 bp, probe
taacattacctatcccatgctgttc

SEQ ID NO: 287429 - DNA, 25 bp, probe
taaaaacactgctatacctccttag

SEQ ID NO: 287430 - DNA, 25 bp, probe
taacacacatcagtggaacttctgt

SEQ ID NO: 287431 - DNA, 25 bp, probe
taacacctcgtgaatacaatttaac

SEQ ID NO: 287432 - DNA, 25 bp, probe
taacaggctcggttctgatttttac

SEQ ID NO: 287433 - DNA, 25 bp, probe
taacaggtcttattggaattgctta

SEQ ID NO: 287434 - DNA, 25 bp, probe
taacagtgccttaaggtatgatgta

SEQ ID NO: 287435 - DNA, 25 bp, probe
tacatcgatgccgtgaaggactgcc

SEQ ID NO: 287436 - DNA, 25 bp, probe
tacacttgcacctggtactgcacat

SEQ ID NO: 287437 - DNA, 25 bp, probe
tacacgctcaccgtgtttgcatgct

SEQ ID NO: 287438 - DNA, 25 bp, probe
tacactgcaaactttgttgcacctg

SEQ ID NO: 287439 - DNA, 25 bp, probe
tacactcttgcattcttaggcatac

SEQ ID NO: 287440 - DNA, 25 bp, probe
tacactcttgcattcttaggcatac

SEQ ID NO: 287441 - DNA, 25 bp, probe
taacatctccatggggaggcctcac

SEQ ID NO: 287442 - DNA, 25 bp, probe
taacacttgggaggggctgcatgca

SEQ ID NO: 287443 - DNA, 25 bp, probe
taaactaggcggctgcagcaagcag

SEQ ID NO: 287444 - DNA, 25 bp, probe
tacaacaagcagcgcgtcctggaga

SEQ ID NO: 287445 - DNA, 25 bp, probe
taccacaagcaggtgtccctgtcgc

SEQ ID NO: 287446 - DNA, 25 bp, probe
tacagagcctgaggggcaccttggc

SEQ ID NO: 287447 - DNA, 25 bp, probe
taacactcgagttggcaccaaacgc

SEQ ID NO: 287448 - DNA, 25 bp, probe
taacatcactatccgatgcaccaaa

SEQ ID NO: 287449 - DNA, 25 bp, probe
taaatcagcgtcaacatgcagtaaa

SEQ ID NO: 287450 - DNA, 25 bp, probe
taaagagcaggatgctgcggaattc

SEQ ID NO: 287451 - DNA, 25 bp, probe
taaagagcaggatgctgcggaattc

SEQ ID NO: 287452 - DNA, 25 bp, probe
taaacaagccattgcagcggcattt

SEQ ID NO: 287453 - DNA, 25 bp, probe
taaatcgctgtcttgagatggatgt

SEQ ID NO: 287454 - DNA, 25 bp, probe
taaatctgccactttctggactgga

SEQ ID NO: 287455 - DNA, 25 bp, probe
taaaatgccacatttctggtctctg

SEQ ID NO: 287456 - DNA, 25 bp, probe
taaaatgccacatttctggtctctg

SEQ ID NO: 287457 - DNA, 25 bp, probe
taaagcagccaattttgtacacatg

SEQ ID NO: 287458 - DNA, 25 bp, probe
taaacactgccatcatctaaccatt

SEQ ID NO: 287459 - DNA, 25 bp, probe
taaactctcctagtcaatatccacc

SEQ ID NO: 287460 - DNA, 25 bp, probe
taaacttcacctacattatctcact

SEQ ID NO: 287461 - DNA, 25 bp, probe
taaatctatcctaaatgttcccttg

SEQ ID NO: 287462 - DNA, 25 bp, probe
taaatctatcctaaatgttcccttg

SEQ ID NO: 287463 - DNA, 25 bp, probe
taaacaacctagacagtacccttgg

SEQ ID NO: 287464 - DNA, 25 bp, probe
taaagcgaggtagggtacgcctttg

SEQ ID NO: 287465 - DNA, 25 bp, probe
taaacagggtacctcaagccccatt

SEQ ID NO: 287466 - DNA, 25 bp, probe
tatcttagtggttccccaccgaagt

SEQ ID NO: 287467 - DNA, 25 bp, probe
ttcttaacagtaagccacccgactg

SEQ ID NO: 287468 - DNA, 25 bp, probe
ttcttcaaccgcacgacggacgtga

SEQ ID NO: 287469 - DNA, 25 bp, probe
ttcctctacggcaccgagaaggtcc

SEQ ID NO: 287470 - DNA, 25 bp, probe
ttcccaaggtgttctaaaacggcag

SEQ ID NO: 287471 - DNA, 25 bp, probe
tttcgagggtctaaaattatctggt

SEQ ID NO: 287472 - DNA, 25 bp, probe
tacactgggtgttcaaatttatttt

SEQ ID NO: 287473 - DNA, 25 bp, probe
ttcaggcggagttggtacttttgct

SEQ ID NO: 287474 - DNA, 25 bp, probe
tacaggggattgtgttttgtcactc

SEQ ID NO: 287475 - DNA, 25 bp, probe
taaagtgcgtggtgttttcgcccaa

SEQ ID NO: 287476 - DNA, 25 bp, probe
tacaacttgggcttgtttacctcca

SEQ ID NO: 287477 - DNA, 25 bp, probe
tacaactgaaggctgtgttcccaca

SEQ ID NO: 287478 - DNA, 25 bp, probe
taaaatagcggcctgtgcccagtac

SEQ ID NO: 287479 - DNA, 25 bp, probe
taaaattgcttgcactgcccaatcc

SEQ ID NO: 287480 - DNA, 25 bp, probe
taaaattgtgtgctctcttcttcac

SEQ ID NO: 287481 - DNA, 25 bp, probe
taacacaggattcactgttttattc

SEQ ID NO: 287482 - DNA, 25 bp, probe
taacagcagggtcacttctcatttt

SEQ ID NO: 287483 - DNA, 25 bp, probe
taaaagagcagacaccttatatatt

SEQ ID NO: 287484 - DNA, 25 bp, probe
taaacacaatagaacctgtcaatat

SEQ ID NO: 287485 - DNA, 25 bp, probe
taaaatcaaatcatcctgtcacaag

SEQ ID NO: 287486 - DNA, 25 bp, probe
tacaaatctttcatccatacctgtg

SEQ ID NO: 287487 - DNA, 25 bp, probe
taaaatctatgtatctattcttttt

SEQ ID NO: 287488 - DNA, 25 bp, probe
taacacttcttttcaaggattaatt

SEQ ID NO: 287489 - DNA, 25 bp, probe
taacacttcttacgcaatgcttcta

SEQ ID NO: 287490 - DNA, 25 bp, probe
taaaatacatgaggacaatgcttta

SEQ ID NO: 287491 - DNA, 25 bp, probe
taaagatactgctgacctgtgcttc

SEQ ID NO: 287492 - DNA, 25 bp, probe
taaaatgccatgatgcctctgtctt

SEQ ID NO: 287493 - DNA, 25 bp, probe
taaaatccaggatcatcaatgctat

SEQ ID NO: 287494 - DNA, 25 bp, probe
taaaatccaggatcatcaatgctat

SEQ ID NO: 287495 - DNA, 25 bp, probe
taaacagctctgcaaacaatccctt

SEQ ID NO: 287496 - DNA, 25 bp, probe
tatgagtcccaaaattcaaccctcc

SEQ ID NO: 287497 - DNA, 25 bp, probe
tacagttcttacaataaaccctcct

SEQ ID NO: 287498 - DNA, 25 bp, probe
taaatcagtttcatacaacctccct

SEQ ID NO: 287499 - DNA, 25 bp, probe
taaatagtttcaataatcctccaag

SEQ ID NO: 287500 - DNA, 25 bp, probe
taaatactgttaaactcttgtccag

SEQ ID NO: 287501 - DNA, 25 bp, probe
tacagctaggacttaaccttgaaat

SEQ ID NO: 287502 - DNA, 25 bp, probe
tacacacaggtcccaaacaggaaac

SEQ ID NO: 287503 - DNA, 25 bp, probe
taaacctgctccaaaacgaaacaag

SEQ ID NO: 287504 - DNA, 25 bp, probe
ttaaccccaataaacggatcacagt

SEQ ID NO: 287505 - DNA, 25 bp, probe
taaaaccacttaaacagcctccagt

SEQ ID NO: 287506 - DNA, 25 bp, probe
taaaaccacttaaacagcctccagt

SEQ ID NO: 287507 - DNA, 25 bp, probe
taaaagcacagcatacacaacccca

SEQ ID NO: 287508 - DNA, 25 bp, probe
taaagatcactggttgaaacacccg

SEQ ID NO: 287509 - DNA, 25 bp, probe
taaagcacaattttggaaaccctgg

SEQ ID NO: 287510 - DNA, 25 bp, probe
tacaacctgattgtggagtaccacg

SEQ ID NO: 287511 - DNA, 25 bp, probe
tacagccctattctagaggatactt

SEQ ID NO: 287512 - DNA, 25 bp, probe
taaacactttgggcagactgaaatt

SEQ ID NO: 287513 - DNA, 25 bp, probe
taaacctctgttgcaatctgaagag

SEQ ID NO: 287514 - DNA, 25 bp, probe
taaacctcaagtaacatctgagaca

SEQ ID NO: 287515 - DNA, 25 bp, probe
taaacacaattgcatacatagagac

SEQ ID NO: 287516 - DNA, 25 bp, probe
taacacaatttaagtcatatagaca

SEQ ID NO: 287517 - DNA, 25 bp, probe
taacacagtgttttatgcataatga

SEQ ID NO: 287518 - DNA, 25 bp, probe
taacaaggttcagttcacagagatt

SEQ ID NO: 287519 - DNA, 25 bp, probe
taaataaatatcactgaatgcagtt

SEQ ID NO: 287520 - DNA, 25 bp, probe
taaaaaaatcacctcaacagccctg

SEQ ID NO: 287521 - DNA, 25 bp, probe
taccaaaagagtatcaaggccagag

SEQ ID NO: 287522 - DNA, 25 bp, probe
taaaacacaagtatctctggtcaga

SEQ ID NO: 287523 - DNA, 25 bp, probe
tactaaaccagtacttcgttatgaa

SEQ ID NO: 287524 - DNA, 25 bp, probe
tacaaagaaagcacttcttattgaa

SEQ ID NO: 287525 - DNA, 25 bp, probe
taaaatggtacaacctctttagaag

SEQ ID NO: 287526 - DNA, 25 bp, probe
taaaatggtacaacctctttagaag

SEQ ID NO: 287527 - DNA, 25 bp, probe
taaaataatatcttcttccttgaaa

SEQ ID NO: 287528 - DNA, 25 bp, probe
tacaagttatactcttatttggaag

SEQ ID NO: 287529 - DNA, 25 bp, probe
taaaattatacagccaggtgggaag

SEQ ID NO: 287530 - DNA, 25 bp, probe
tacaacgtgtcccacctggtggggt

SEQ ID NO: 287531 - DNA, 25 bp, probe
tacaacgtgtcccacctggtggggt

SEQ ID NO: 287532 - DNA, 25 bp, probe
tactaaggaccttgactgtgtggaa

SEQ ID NO: 287533 - DNA, 25 bp, probe
tactaaggaccttgactgtgtggaa

SEQ ID NO: 287534 - DNA, 25 bp, probe
tacggaccagccatcctgagctggg

SEQ ID NO: 287535 - DNA, 25 bp, probe
tacatgggcttggccgaagagctgg

SEQ ID NO: 287536 - DNA, 25 bp, probe
tacagccgcttcctgcgaaaggctg

SEQ ID NO: 287537 - DNA, 25 bp, probe
tacagccggctggggaagcagcccc

SEQ ID NO: 287538 - DNA, 25 bp, probe
tacagccggctggggaagcagcccc

SEQ ID NO: 287539 - DNA, 25 bp, probe
tacagcggtgtctcagacactgacc

SEQ ID NO: 287540 - DNA, 25 bp, probe
tacagcggtgtctcagacactgacc

SEQ ID NO: 287541 - DNA, 25 bp, probe
tacagcggtacagtgaggaccccac

SEQ ID NO: 287542 - DNA, 25 bp, probe
tacagctggtacaaggggcagccca

SEQ ID NO: 287543 - DNA, 25 bp, probe
tacagctctaaagggcggcacaaag

SEQ ID NO: 287544 - DNA, 25 bp, probe
tacagcgtgcacaggtgctggacaa

SEQ ID NO: 287545 - DNA, 25 bp, probe
tacatcgttcatccggtggaaacag

SEQ ID NO: 287546 - DNA, 25 bp, probe
tacaaatatttgcttggcaacacga

SEQ ID NO: 287547 - DNA, 25 bp, probe
taaatatattcagagtaacacagga

SEQ ID NO: 287548 - DNA, 25 bp, probe
tacatgtgtttttgggaacaaggaa

SEQ ID NO: 287549 - DNA, 25 bp, probe
tacagtttctgggccctaaaagcaa

SEQ ID NO: 287550 - DNA, 25 bp, probe
tacttatatcaaggtcccaaaatat

SEQ ID NO: 287551 - DNA, 25 bp, probe
tacatgttcatctcttgccaaataa

SEQ ID NO: 287552 - DNA, 25 bp, probe
tacagcaaaaccagtctattagacg

SEQ ID NO: 287553 - DNA, 25 bp, probe
tacagcaaaaccagtctattagacg

SEQ ID NO: 287554 - DNA, 25 bp, probe
taaaattatctcagtgttctacacc

SEQ ID NO: 287555 - DNA, 25 bp, probe
taaaatacctgcaagtgatctgctt

SEQ ID NO: 287556 - DNA, 25 bp, probe
ttatactaattcagcaatcccccat

SEQ ID NO: 287557 - DNA, 25 bp, probe
taaatctaaatctcattcccttctt

SEQ ID NO: 287558 - DNA, 25 bp, probe
taaactcacaaacacttggctccta

SEQ ID NO: 287559 - DNA, 25 bp, probe
taaactataacaaacttatgctgcc

SEQ ID NO: 287560 - DNA, 25 bp, probe
tacaatctgatataaatctgaatac

SEQ ID NO: 287561 - DNA, 25 bp, probe
taaatgtggaattgaacgactaccc

SEQ ID NO: 287562 - DNA, 25 bp, probe
taaatgtacaattgattgcaacatc

SEQ ID NO: 287563 - DNA, 25 bp, probe
taaaaagcagcttattgaatattta

SEQ ID NO: 287564 - DNA, 25 bp, probe
taaaacagcctatagatgatgatgt

SEQ ID NO: 287565 - DNA, 25 bp, probe
taaatactgtacatagatgtatcat

SEQ ID NO: 287566 - DNA, 25 bp, probe
taaatacattccatgggctcacacg

SEQ ID NO: 287567 - DNA, 25 bp, probe
taaatacattccatggggctcacac

SEQ ID NO: 287568 - DNA, 25 bp, probe
tagcagctattgtccttgggggcac

SEQ ID NO: 287569 - DNA, 25 bp, probe
tacagatttctccatctagcggaac

SEQ ID NO: 287570 - DNA, 25 bp, probe
tacaactgttggaccggggagccac

SEQ ID NO: 287571 - DNA, 25 bp, probe
tacaactgttggaccggggagccac

SEQ ID NO: 287572 - DNA, 25 bp, probe
tagcaaaggggcacctgaggttcac

SEQ ID NO: 287573 - DNA, 25 bp, probe
tagcaaggggacacgtggttccctc

SEQ ID NO: 287574 - DNA, 25 bp, probe
tagcaaggggacacgtggttccctc

SEQ ID NO: 287575 - DNA, 25 bp, probe
tacaacgggcacacgaaggtggcgg

SEQ ID NO: 287576 - DNA, 25 bp, probe
taccacgtcccaggcgaagggaccg

SEQ ID NO: 287577 - DNA, 25 bp, probe
tactcacattcacacgcgattgcgc

SEQ ID NO: 287578 - DNA, 25 bp, probe
tactgaatctcctacatgtattgct

SEQ ID NO: 287579 - DNA, 25 bp, probe
tacaatgagccttactgtatttagt

SEQ ID NO: 287580 - DNA, 25 bp, probe
tacaaggccatccggctcatttttg

SEQ ID NO: 287581 - DNA, 25 bp, probe
tagaaacctcaccccattgattggt

SEQ ID NO: 287582 - DNA, 25 bp, probe
taaacacctggacccaatcagggaa

SEQ ID NO: 287583 - DNA, 25 bp, probe
taaacacctggacccaatcagggaa

SEQ ID NO: 287584 - DNA, 25 bp, probe
taaaatcctgggcatcattctgggg

SEQ ID NO: 287585 - DNA, 25 bp, probe
taaattcggtgccgatcttctggcc

SEQ ID NO: 287586 - DNA, 25 bp, probe
tactttagcgggctgcaatgccgcc

SEQ ID NO: 287587 - DNA, 25 bp, probe
tacagttgcatcaggcctgaacccg

SEQ ID NO: 287588 - DNA, 25 bp, probe
tacagttgcatcaggcctgaacccg

SEQ ID NO: 287589 - DNA, 25 bp, probe
tacagtggcattaggacttaccgct

SEQ ID NO: 287590 - DNA, 25 bp, probe
tacactgcacaggaagccttcacac

SEQ ID NO: 287591 - DNA, 25 bp, probe
tacactgcacaggaagccttcacac

SEQ ID NO: 287592 - DNA, 25 bp, probe
tagcgctcacgcaagcatggttaac

SEQ ID NO: 287593 - DNA, 25 bp, probe
tacactatccatccatagatatcaa

SEQ ID NO: 287594 - DNA, 25 bp, probe
tacaatcactaggatggctacaata

SEQ ID NO: 287595 - DNA, 25 bp, probe
taaactcaagtgcctgctacacata

SEQ ID NO: 287596 - DNA, 25 bp, probe
taaactcaagtgcctgctacacata

SEQ ID NO: 287597 - DNA, 25 bp, probe
taaactcaaagccagccaagccagg

SEQ ID NO: 287598 - DNA, 25 bp, probe
taaatggagaaccagcccatgcctc

SEQ ID NO: 287599 - DNA, 25 bp, probe
taaatggagaaccagcccatgcctc

SEQ ID NO: 287600 - DNA, 25 bp, probe
taaatggaaatgtaagtatctctta

SEQ ID NO: 287601 - DNA, 25 bp, probe
taaatggaaatgtaagtatctctta

SEQ ID NO: 287602 - DNA, 25 bp, probe
taaagtgcatagatttctatcttaa

SEQ ID NO: 287603 - DNA, 25 bp, probe
taaatgtcagttatctttctttaaa

SEQ ID NO: 287604 - DNA, 25 bp, probe
taaaacacattgccctgttgctctt

SEQ ID NO: 287605 - DNA, 25 bp, probe
taaaacacattgccctgttgctctt

SEQ ID NO: 287606 - DNA, 25 bp, probe
taaacatcactttgtctatcctcat

SEQ ID NO: 287607 - DNA, 25 bp, probe
taaacatcactttgtctatcctcat

SEQ ID NO: 287608 - DNA, 25 bp, probe
taaataacttgggccatcctatcat

SEQ ID NO: 287609 - DNA, 25 bp, probe
taaataatgtcatcgcctccaactg

SEQ ID NO: 287610 - DNA, 25 bp, probe
tacaatgtatccaacagacactcaa

SEQ ID NO: 287611 - DNA, 25 bp, probe
tacaagaggtgaagatgacagtgca

SEQ ID NO: 287612 - DNA, 25 bp, probe
taaaacggcagcgagagctgtgcac

SEQ ID NO: 287613 - DNA, 25 bp, probe
tagaaatcggaggtgtggatgctct

SEQ ID NO: 287614 - DNA, 25 bp, probe
taaactatgtgggtctgtgaatttc

SEQ ID NO: 287615 - DNA, 25 bp, probe
taaacttatgtcctattgttttgtg

SEQ ID NO: 287616 - DNA, 25 bp, probe
taaatttgagatccttggggttgta

SEQ ID NO: 287617 - DNA, 25 bp, probe
taaatttgagatccttggggttgta

SEQ ID NO: 287618 - DNA, 25 bp, probe
tacacattttgcacttgggaggagg

SEQ ID NO: 287619 - DNA, 25 bp, probe
taaaggtcatgcagctggtggtggg

SEQ ID NO: 287620 - DNA, 25 bp, probe
taaagcgagctgacgctggttttgt

SEQ ID NO: 287621 - DNA, 25 bp, probe
taaacgcagcgacgtgagggtcctg

SEQ ID NO: 287622 - DNA, 25 bp, probe
taaactgctgctcgcaaggaagtcc

SEQ ID NO: 287623 - DNA, 25 bp, probe
taaagctgttggaatgagtatgtga

SEQ ID NO: 287624 - DNA, 25 bp, probe
taaaccatctgaattggctcaatga

SEQ ID NO: 287625 - DNA, 25 bp, probe
tacaagccttgaacatcgtcctgct

SEQ ID NO: 287626 - DNA, 25 bp, probe
taaagcctcaaggacatctgcctgt

SEQ ID NO: 287627 - DNA, 25 bp, probe
taaagcctcaaggacatctgcctgt

SEQ ID NO: 287628 - DNA, 25 bp, probe
taaatactccaggatcatctttcca

SEQ ID NO: 287629 - DNA, 25 bp, probe
taaatactccaggatcatctttcca

SEQ ID NO: 287630 - DNA, 25 bp, probe
taaatattccattgctctgtagttc

SEQ ID NO: 287631 - DNA, 25 bp, probe
taaatttaattgctgtggatactgt

SEQ ID NO: 287632 - DNA, 25 bp, probe
taaatctgaatacaggattattctg

SEQ ID NO: 287633 - DNA, 25 bp, probe
taaactggatacaaatgctgcattt

SEQ ID NO: 287634 - DNA, 25 bp, probe
taaactaatggaaatgctcatttaa

SEQ ID NO: 287635 - DNA, 25 bp, probe
taaatggacctaactcatcaattaa

SEQ ID NO: 287636 - DNA, 25 bp, probe
taaaggacatcctcatcatcacggg

SEQ ID NO: 287637 - DNA, 25 bp, probe
taaaaacactcttatcagcctgggc

SEQ ID NO: 287638 - DNA, 25 bp, probe
tagaaaacccttacactttggctat

SEQ ID NO: 287639 - DNA, 25 bp, probe
tacaaacacctttacttttgcactt

SEQ ID NO: 287640 - DNA, 25 bp, probe
taaagacctctttaatttgtaactg

SEQ ID NO: 287641 - DNA, 25 bp, probe
taaagaacactttcaaattaaatat

SEQ ID NO: 287642 - DNA, 25 bp, probe
taaaccaccattttaatgtactgta

SEQ ID NO: 287643 - DNA, 25 bp, probe
taaaccagtctttcgacatgggcgt

SEQ ID NO: 287644 - DNA, 25 bp, probe
taaagcacagttagacccaaggcct

SEQ ID NO: 287645 - DNA, 25 bp, probe
taaagccagtggcagctcccactgc

SEQ ID NO: 287646 - DNA, 25 bp, probe
tacagcagcaagaggagtccaagtc

SEQ ID NO: 287647 - DNA, 25 bp, probe
tacatccataccagatatcccactc

SEQ ID NO: 287648 - DNA, 25 bp, probe
tacatggaacgcatgaactacattc

SEQ ID NO: 287649 - DNA, 25 bp, probe
tacacagattagcagaagtcacttc

SEQ ID NO: 287650 - DNA, 25 bp, probe
taaagactgcagcgcaggcggcctt

SEQ ID NO: 287651 - DNA, 25 bp, probe
taaagacgactcggaggaccttaag

SEQ ID NO: 287652 - DNA, 25 bp, probe
taaatacgaccaaagaccactctca

SEQ ID NO: 287653 - DNA, 25 bp, probe
taaattaggcctaatcctcactctt

SEQ ID NO: 287654 - DNA, 25 bp, probe
taaaaaggccttctctcatgatcta

SEQ ID NO: 287655 - DNA, 25 bp, probe
taaaaaggccttctctcatgatcta

SEQ ID NO: 287656 - DNA, 25 bp, probe
tacaaacaagcccattgtcctgtgc

SEQ ID NO: 287657 - DNA, 25 bp, probe
tacaaagccacctagggcctgggga

SEQ ID NO: 287658 - DNA, 25 bp, probe
tagaaacccctacgtgtgggactga

SEQ ID NO: 287659 - DNA, 25 bp, probe
tacaaacccaacatggtggagacca

SEQ ID NO: 287660 - DNA, 25 bp, probe
tacaaggcccagatgtggttgcata

SEQ ID NO: 287661 - DNA, 25 bp, probe
tacaaggcccagatgtggttgcata

SEQ ID NO: 287662 - DNA, 25 bp, probe
tacagagcgtcctggatgatttcta

SEQ ID NO: 287663 - DNA, 25 bp, probe
tacagagcgtcctggatgatttcta

SEQ ID NO: 287664 - DNA, 25 bp, probe
tacaagcggcacaaggatgctcgcc

SEQ ID NO: 287665 - DNA, 25 bp, probe
taaagcgcacacaaccattcaggct

SEQ ID NO: 287666 - DNA, 25 bp, probe
tacaaccactgctaccagtagtggg

SEQ ID NO: 287667 - DNA, 25 bp, probe
taaaccctcatgtacatctggtagg

SEQ ID NO: 287668 - DNA, 25 bp, probe
taaagcactttagcatctgttcagg

SEQ ID NO: 287669 - DNA, 25 bp, probe
taaatcctgtgtttcattacttgaa

SEQ ID NO: 287670 - DNA, 25 bp, probe
taaatcacagtgcacaatattctta

SEQ ID NO: 287671 - DNA, 25 bp, probe
taaaaattggactatcatctgttga

SEQ ID NO: 287672 - DNA, 25 bp, probe
taaaaattggactatcatctgttga

SEQ ID NO: 287673 - DNA, 25 bp, probe
taaagaattgctgctactttgtgca

SEQ ID NO: 287674 - DNA, 25 bp, probe
taaacatcatttgttcttcagtatt

SEQ ID NO: 287675 - DNA, 25 bp, probe
taaatcatttcagggtttaattttg

SEQ ID NO: 287676 - DNA, 25 bp, probe
taaatcagttttgttgtgagttctt

SEQ ID NO: 287677 - DNA, 25 bp, probe
tattcaacttttgtagtatttacgt

SEQ ID NO: 287678 - DNA, 25 bp, probe
tactacactttatccattattctac

SEQ ID NO: 287679 - DNA, 25 bp, probe
taaacctcagaatctgcttattaac

SEQ ID NO: 287680 - DNA, 25 bp, probe
taaaccactattccatgcttttaag

SEQ ID NO: 287681 - DNA, 25 bp, probe
taaagccacaaacccatctagtcat

SEQ ID NO: 287682 - DNA, 25 bp, probe
taaagccagccaagatccttttcca

SEQ ID NO: 287683 - DNA, 25 bp, probe
taaagccagaaattcttgcttccca

SEQ ID NO: 287684 - DNA, 25 bp, probe
taaaccaagaattttggacttgcaa

SEQ ID NO: 287685 - DNA, 25 bp, probe
taaaccttcaatttatggtcttctg

SEQ ID NO: 287686 - DNA, 25 bp, probe
tacaaatttcaatgtaactttctgg

SEQ ID NO: 287687 - DNA, 25 bp, probe
tacaagtcttgaatagtacattttc

SEQ ID NO: 287688 - DNA, 25 bp, probe
taaacctctgttggtaagtatacat

SEQ ID NO: 287689 - DNA, 25 bp, probe
taaacctctgttggtggagaaggag

SEQ ID NO: 287690 - DNA, 25 bp, probe
tatgcaccctccaggggacaactga

SEQ ID NO: 287691 - DNA, 25 bp, probe
tatgcaccctccaggggacaactga

SEQ ID NO: 287692 - DNA, 25 bp, probe
tataccacaccgaggagtccagttt

SEQ ID NO: 287693 - DNA, 25 bp, probe
tataccacaccgaggagtccagttt

SEQ ID NO: 287694 - DNA, 25 bp, probe
tacagccacattggcagctgtgacc

SEQ ID NO: 287695 - DNA, 25 bp, probe
ttctctgcatgcttgcagccattga

SEQ ID NO: 287696 - DNA, 25 bp, probe
ttcttctactggcttgtaatttagg

SEQ ID NO: 287697 - DNA, 25 bp, probe
tactttaggactgtgtagttgtata

SEQ ID NO: 287698 - DNA, 25 bp, probe
tacttgtagaaatctgtaattctat

SEQ ID NO: 287699 - DNA, 25 bp, probe
tacttgtaaaaccaccgcattctag

SEQ ID NO: 287700 - DNA, 25 bp, probe
tacttcttagaatatgcctgtccaa

SEQ ID NO: 287701 - DNA, 25 bp, probe
tacttttggagctggccttctcaag

SEQ ID NO: 287702 - DNA, 25 bp, probe
tacatttcttactgccgattgctta

SEQ ID NO: 287703 - DNA, 25 bp, probe
taaaccctccaagggatctgcttga

SEQ ID NO: 287704 - DNA, 25 bp, probe
taaacccctcagacagtttgcttat

SEQ ID NO: 287705 - DNA, 25 bp, probe
taaatttcctcgaacactctcttca

SEQ ID NO: 287706 - DNA, 25 bp, probe
taaataaccctgaagactccacata

SEQ ID NO: 287707 - DNA, 25 bp, probe
taaataaaaccttctctccagcaca

SEQ ID NO: 287708 - DNA, 25 bp, probe
taaataaaaccttctctccagcaca

SEQ ID NO: 287709 - DNA, 25 bp, probe
tatactaaagcccttttcccatgca

SEQ ID NO: 287710 - DNA, 25 bp, probe
tacagtcatggacccttttcttcac

SEQ ID NO: 287711 - DNA, 25 bp, probe
taaatgctgtatgcttttttgccac

SEQ ID NO: 287712 - DNA, 25 bp, probe
taaagctttctgtttgtgttccata

SEQ ID NO: 287713 - DNA, 25 bp, probe
tacacacgtatctcatttttatcaa

SEQ ID NO: 287714 - DNA, 25 bp, probe
tacacactattttatatccttattc

SEQ ID NO: 287715 - DNA, 25 bp, probe
tactcacatttttggtagtgtttca

SEQ ID NO: 287716 - DNA, 25 bp, probe
tacattcagttcttgtgtcgtttgt

SEQ ID NO: 287717 - DNA, 25 bp, probe
tacttcgtatggtgagctttatggt

SEQ ID NO: 287718 - DNA, 25 bp, probe
taccatgggaggggagttcttactg

SEQ ID NO: 287719 - DNA, 25 bp, probe
tacttgggaaggggtcctggcctga

SEQ ID NO: 287720 - DNA, 25 bp, probe
tacttgggcaagggtgctttccttc

SEQ ID NO: 287721 - DNA, 25 bp, probe
tacttagaaaaactcgctactttca

SEQ ID NO: 287722 - DNA, 25 bp, probe
taccggaacgaaatagcttatttga

SEQ ID NO: 287723 - DNA, 25 bp, probe
taccaggtaccataacctcttgggt

SEQ ID NO: 287724 - DNA, 25 bp, probe
tagaagttagtatacaatattgggg

SEQ ID NO: 287725 - DNA, 25 bp, probe
tatgaaggaatttgtacctttgggg

SEQ ID NO: 287726 - DNA, 25 bp, probe
tatacgaaatatggttccttttgtg

SEQ ID NO: 287727 - DNA, 25 bp, probe
taaagatagttgctaatccttattt

SEQ ID NO: 287728 - DNA, 25 bp, probe
taaagatgacttcgtagcagcacct

SEQ ID NO: 287729 - DNA, 25 bp, probe
tacaatatgagccttctgaagcatc

SEQ ID NO: 287730 - DNA, 25 bp, probe
tacactatctggcacatatgcgctc

SEQ ID NO: 287731 - DNA, 25 bp, probe
tacactatctgtggcactcttcagt

SEQ ID NO: 287732 - DNA, 25 bp, probe
tacactatctgtggcactcttcagt

SEQ ID NO: 287733 - DNA, 25 bp, probe
tacagtcatctctcactcttactgt

SEQ ID NO: 287734 - DNA, 25 bp, probe
tacaggtttacagttcatgcctgtg

SEQ ID NO: 287735 - DNA, 25 bp, probe
tacgggtgtacagctgcaccttgtc

SEQ ID NO: 287736 - DNA, 25 bp, probe
tactgggactacgaggctcacgtcc

SEQ ID NO: 287737 - DNA, 25 bp, probe
tactaaactcacaagcgtacctcct

SEQ ID NO: 287738 - DNA, 25 bp, probe
tacacagcaacccaagggacctctc

SEQ ID NO: 287739 - DNA, 25 bp, probe
tacacagccacggaagggcaatacc

SEQ ID NO: 287740 - DNA, 25 bp, probe
tacacagccacggaagggcaatacc

SEQ ID NO: 287741 - DNA, 25 bp, probe
tacaaggacatagcacagacagtga

SEQ ID NO: 287742 - DNA, 25 bp, probe
tacaaggacatagcacagacagtga

SEQ ID NO: 287743 - DNA, 25 bp, probe
tatcaaggaaactgcagacgaattg

SEQ ID NO: 287744 - DNA, 25 bp, probe
taaagctggaaagggacgaactggt

SEQ ID NO: 287745 - DNA, 25 bp, probe
taaagcggtagaggaaggctatcgt

SEQ ID NO: 287746 - DNA, 25 bp, probe
taaaggggagctgaaggcagctcgg

SEQ ID NO: 287747 - DNA, 25 bp, probe
taaaggagctccggaaggccatcga

SEQ ID NO: 287748 - DNA, 25 bp, probe
taaaggagctccggaaggccatcga

SEQ ID NO: 287749 - DNA, 25 bp, probe
taaagtgaggctcgctaaccctcta

SEQ ID NO: 287750 - DNA, 25 bp, probe
tacaaggggatcgacaaccacacca

SEQ ID NO: 287751 - DNA, 25 bp, probe
tacgaattggccgactacagcaacc

SEQ ID NO: 287752 - DNA, 25 bp, probe
tactgaagggccatccaactacgga

SEQ ID NO: 287753 - DNA, 25 bp, probe
tactgttcgttcaccaacggcgaga

SEQ ID NO: 287754 - DNA, 25 bp, probe
tacatttcctgcaccaacaaggcca

SEQ ID NO: 287755 - DNA, 25 bp, probe
tactttccagtatgaacgcacagga

SEQ ID NO: 287756 - DNA, 25 bp, probe
tttcttccggcaaaacgatgggcag

SEQ ID NO: 287757 - DNA, 25 bp, probe
tactcctccgaaagcgacgtgtgga

SEQ ID NO: 287758 - DNA, 25 bp, probe
tactcctccgaaagcgacgtgtgga

SEQ ID NO: 287759 - DNA, 25 bp, probe
tactcggcccagatagcctgtggga

SEQ ID NO: 287760 - DNA, 25 bp, probe
tactacagcccggaatgccgggggg

SEQ ID NO: 287761 - DNA, 25 bp, probe
tactcatatgcttacaaactcggtg

SEQ ID NO: 287762 - DNA, 25 bp, probe
tactcttgctggagaaccgatccct

SEQ ID NO: 287763 - DNA, 25 bp, probe
tacttctcactacgaaccagtcact

SEQ ID NO: 287764 - DNA, 25 bp, probe
tactaatgaacctgtccagctcact

SEQ ID NO: 287765 - DNA, 25 bp, probe
tacaaaaatcacttgccagcagtag

SEQ ID NO: 287766 - DNA, 25 bp, probe
taaagacacatccacggacctgagt

SEQ ID NO: 287767 - DNA, 25 bp, probe
tacaaagagaacgtggacatctggt

SEQ ID NO: 287768 - DNA, 25 bp, probe
tacaaaagtaccatagcacagcact

SEQ ID NO: 287769 - DNA, 25 bp, probe
tacacaaatccagctaacaccagcc

SEQ ID NO: 287770 - DNA, 25 bp, probe
tacacatgttgccccaaatacaagc

SEQ ID NO: 287771 - DNA, 25 bp, probe
tacacatgttgccccaaatacaagc

SEQ ID NO: 287772 - DNA, 25 bp, probe
ttcaagttggtgcaaaacaggctga

SEQ ID NO: 287773 - DNA, 25 bp, probe
ttcaagttggtgcaaaacaggctga

SEQ ID NO: 287774 - DNA, 25 bp, probe
ttcatttattgcctaagaaaccgag

SEQ ID NO: 287775 - DNA, 25 bp, probe
ttcatttattgcctaagaaaccgag

SEQ ID NO: 287776 - DNA, 25 bp, probe
tactttatactttaactacctgaga

SEQ ID NO: 287777 - DNA, 25 bp, probe
tactctttgccctttagctaactaa

SEQ ID NO: 287778 - DNA, 25 bp, probe
tactttggtcctctatgtatttaaa

SEQ ID NO: 287779 - DNA, 25 bp, probe
tatttaggtccagcagctacattta

SEQ ID NO: 287780 - DNA, 25 bp, probe
tactgtaattccaacctacattaga

SEQ ID NO: 287781 - DNA, 25 bp, probe
tactgtaattccaacctacattaga

SEQ ID NO: 287782 - DNA, 25 bp, probe
tagcctaactacacacatcaaaatg

SEQ ID NO: 287783 - DNA, 25 bp, probe
taaatattctacacatgtaaaatat

SEQ ID NO: 287784 - DNA, 25 bp, probe
taaatattcttctgacttaggattg

SEQ ID NO: 287785 - DNA, 25 bp, probe
taaatgcatgtctttaccttcattt

SEQ ID NO: 287786 - DNA, 25 bp, probe
tacagatatttattacgctttccag

SEQ ID NO: 287787 - DNA, 25 bp, probe
taaatgtgtggtgactgctttgtag

SEQ ID NO: 287788 - DNA, 25 bp, probe
taaagttatcttacgctatttctgt

SEQ ID NO: 287789 - DNA, 25 bp, probe
tacatagttactatcagtagttatt

SEQ ID NO: 287790 - DNA, 25 bp, probe
tacaatttccatatagtctattcat

SEQ ID NO: 287791 - DNA, 25 bp, probe
tacaatttccatatagtctattcat

SEQ ID NO: 287792 - DNA, 25 bp, probe
taaatagtcactagtattgctaatt

SEQ ID NO: 287793 - DNA, 25 bp, probe
taaattgtgcgctgtattttgcaga

SEQ ID NO: 287794 - DNA, 25 bp, probe
tacaattgtcatgtctagatttaaa

SEQ ID NO: 287795 - DNA, 25 bp, probe
taaagttcacattctaactggaaag

SEQ ID NO: 287796 - DNA, 25 bp, probe
taaagcttagcttctgtacatggaa

SEQ ID NO: 287797 - DNA, 25 bp, probe
tacacagtcaacctctacagcagtg

SEQ ID NO: 287798 - DNA, 25 bp, probe
tacagcactagacattgcaacagga

SEQ ID NO: 287799 - DNA, 25 bp, probe
tacatacaaaaattgcattagagca

SEQ ID NO: 287800 - DNA, 25 bp, probe
tacaggctaaatatacatcatagca

SEQ ID NO: 287801 - DNA, 25 bp, probe
tacgagcagaaagatccatcttgct

SEQ ID NO: 287802 - DNA, 25 bp, probe
tacggcgctaaggatgactctggtc

SEQ ID NO: 287803 - DNA, 25 bp, probe
tacaagcctcaagatggctctgtgt

SEQ ID NO: 287804 - DNA, 25 bp, probe
tacaacctgaatgagggcaatgcta

SEQ ID NO: 287805 - DNA, 25 bp, probe
actgcactccagcctgggcgacaga

SEQ ID NO: 287806 - DNA, 25 bp, probe
taaagctctagaaacgcaatcaaag

SEQ ID NO: 287807 - DNA, 25 bp, probe
taaagctgctggacaaggccacata

SEQ ID NO: 287808 - DNA, 25 bp, probe
taaagctctggattactgccacagc

SEQ ID NO: 287809 - DNA, 25 bp, probe
tacatggctgtggttcctaagcctg

SEQ ID NO: 287810 - DNA, 25 bp, probe
tacaggctgtgtgttagctacttga

SEQ ID NO: 287811 - DNA, 25 bp, probe
tacaggctgtgtgttagctacttga

SEQ ID NO: 287812 - DNA, 25 bp, probe
tacagcgcgttgcttcgctggactt

SEQ ID NO: 287813 - DNA, 25 bp, probe
tacaaccttgccatcgaggagcact

SEQ ID NO: 287814 - DNA, 25 bp, probe
tacagagacctggctggcaacgagc

SEQ ID NO: 287815 - DNA, 25 bp, probe
tacagagacctggctggcaacgagc

SEQ ID NO: 287816 - DNA, 25 bp, probe
tacagaacagctgctggtgcttcag

SEQ ID NO: 287817 - DNA, 25 bp, probe
tacaaatcactaccgctttgcaatc

SEQ ID NO: 287818 - DNA, 25 bp, probe
taaagtcactgaccttaacagttta

SEQ ID NO: 287819 - DNA, 25 bp, probe
tacagtgtcgctttttgaatagttt

SEQ ID NO: 287820 - DNA, 25 bp, probe
tacaatatcctggctttattattct

SEQ ID NO: 287821 - DNA, 25 bp, probe
tacaatatcctggctttattattct

SEQ ID NO: 287822 - DNA, 25 bp, probe
taaatgataccacatatttgtttgt

SEQ ID NO: 287823 - DNA, 25 bp, probe
taaataaccaggaagcattgctttt

SEQ ID NO: 287824 - DNA, 25 bp, probe
taaagagaccggccagattgttgct

SEQ ID NO: 287825 - DNA, 25 bp, probe
tacaaggcatggcgtagagggtgct

SEQ ID NO: 287826 - DNA, 25 bp, probe
tacacggctcgggaaggggccaagt

SEQ ID NO: 287827 - DNA, 25 bp, probe
taccgagacgcagccggggtggagt

SEQ ID NO: 287828 - DNA, 25 bp, probe
tacatcggagcacaccgagggctga

SEQ ID NO: 287829 - DNA, 25 bp, probe
tacacagcgaaccacaggatggggc

SEQ ID NO: 287830 - DNA, 25 bp, probe
tacaaggacagcttcgcggctgctg

SEQ ID NO: 287831 - DNA, 25 bp, probe
tacaaggacagcttcgcggctgctg

SEQ ID NO: 287832 - DNA, 25 bp, probe
tacaagtggcacttcaatgagacgg

SEQ ID NO: 287833 - DNA, 25 bp, probe
tacctggacatgtatcagatgctga

SEQ ID NO: 287834 - DNA, 25 bp, probe
tacctaaagtggcatatgcgacggc

SEQ ID NO: 287835 - DNA, 25 bp, probe
tacctacaagctcccttggaatgcc

SEQ ID NO: 287836 - DNA, 25 bp, probe
tactaacaatgtccactacgagaac

SEQ ID NO: 287837 - DNA, 25 bp, probe
tacaaagaatgtggaccctccaacc

SEQ ID NO: 287838 - DNA, 25 bp, probe
tacaacacaattgcatcccaaatac

SEQ ID NO: 287839 - DNA, 25 bp, probe
tagaggaaattcatcccaaaagcca

SEQ ID NO: 287840 - DNA, 25 bp, probe
tacaggaattttacaccagacggtt

SEQ ID NO: 287841 - DNA, 25 bp, probe
tacaggaattttacaccagacggtt

SEQ ID NO: 287842 - DNA, 25 bp, probe
tacaaagatcttttttcaggtggat

SEQ ID NO: 287843 - DNA, 25 bp, probe
tacaatctgactcaactgccaggtg

SEQ ID NO: 287844 - DNA, 25 bp, probe
tacatagctcctgagatcctgcagg

SEQ ID NO: 287845 - DNA, 25 bp, probe
tacaacctgatgcgtctgctgagga

SEQ ID NO: 287846 - DNA, 25 bp, probe
tacaacctgctcaaggtcgtggacc

SEQ ID NO: 287847 - DNA, 25 bp, probe
tacaacgtgtcccatgtcgtgggct

SEQ ID NO: 287848 - DNA, 25 bp, probe
tacactggtgtctagctgttgtgga

SEQ ID NO: 287849 - DNA, 25 bp, probe
tacactgtttgaatgtgctggtaac

SEQ ID NO: 287850 - DNA, 25 bp, probe
tacactgtttgaatgtgctggtaac

SEQ ID NO: 287851 - DNA, 25 bp, probe
tacagtgttagaatactgtgaaggc

SEQ ID NO: 287852 - DNA, 25 bp, probe
tacaggtctaagccaggcgagggca

SEQ ID NO: 287853 - DNA, 25 bp, probe
tacaacatctcggccaacgggctga

SEQ ID NO: 287854 - DNA, 25 bp, probe
tacttcactgccgggcatggtggct

SEQ ID NO: 287855 - DNA, 25 bp, probe
tacttgttgcaagggagaagactcc

SEQ ID NO: 287856 - DNA, 25 bp, probe
tacatcgctcgacagctgcaggaac

SEQ ID NO: 287857 - DNA, 25 bp, probe
tacattggcacagagccatggaaac

SEQ ID NO: 287858 - DNA, 25 bp, probe
tacactgaccttaggcatggagaaa

SEQ ID NO: 287859 - DNA, 25 bp, probe
tacactgtccctgggcaggtgtgga

SEQ ID NO: 287860 - DNA, 25 bp, probe
tacagcttccaggtggccagaggga

SEQ ID NO: 287861 - DNA, 25 bp, probe
tacaaggccaagcgccagtgaggac

SEQ ID NO: 287862 - DNA, 25 bp, probe
taaagaccaaaaactgtgctgagaa

SEQ ID NO: 287863 - DNA, 25 bp, probe
tactcagcccaagaatttgtcagga

SEQ ID NO: 287864 - DNA, 25 bp, probe
tacatatcccaagccctttagggct

SEQ ID NO: 287865 - DNA, 25 bp, probe
tacaaactccgtaccttacaggtct

SEQ ID NO: 287866 - DNA, 25 bp, probe
tacaacccacagtaccaatactttc

SEQ ID NO: 287867 - DNA, 25 bp, probe
tacaacattcaactttagtattttt

SEQ ID NO: 287868 - DNA, 25 bp, probe
tacaaaagcaattttcatttacctt

SEQ ID NO: 287869 - DNA, 25 bp, probe
taaagacacagtgcttacttacctt

SEQ ID NO: 287870 - DNA, 25 bp, probe
tatacaccagggcttacttctcact

SEQ ID NO: 287871 - DNA, 25 bp, probe
tatacaccagggcttacttctcact

SEQ ID NO: 287872 - DNA, 25 bp, probe
taaagcaacgtgctttcagcctctt

SEQ ID NO: 287873 - DNA, 25 bp, probe
taaagcacttgtcttttgctcttta

SEQ ID NO: 287874 - DNA, 25 bp, probe
taaatctttgtgtactttatttgta

SEQ ID NO: 287875 - DNA, 25 bp, probe
taaatctaatattagccttgtcttt

SEQ ID NO: 287876 - DNA, 25 bp, probe
taaagatttatctgcatattctttt

SEQ ID NO: 287877 - DNA, 25 bp, probe
taaatgatttcattcaatatctttt

SEQ ID NO: 287878 - DNA, 25 bp, probe
tactagatctcatacaaggcttatt

SEQ ID NO: 287879 - DNA, 25 bp, probe
tacaggatctatgtaggtgttgatg

SEQ ID NO: 287880 - DNA, 25 bp, probe
tacagagatattttcatgggttcag

SEQ ID NO: 287881 - DNA, 25 bp, probe
tacacaatatatagaccaggttcag

SEQ ID NO: 287882 - DNA, 25 bp, probe
tacacaatatatagaccaggttcag

SEQ ID NO: 287883 - DNA, 25 bp, probe
tacacacaaaaggctcagtgcatta

SEQ ID NO: 287884 - DNA, 25 bp, probe
tacacacaaaaggctcagtgcatta

SEQ ID NO: 287885 - DNA, 25 bp, probe
tacacacacaaggacctggattaaa

SEQ ID NO: 287886 - DNA, 25 bp, probe
tatccgatgcaccaaactaataaaa

SEQ ID NO: 287887 - DNA, 25 bp, probe
tacaagagactcaaatctaaaacat

SEQ ID NO: 287888 - DNA, 25 bp, probe
tacagggacctgaagttggacaatt

SEQ ID NO: 287889 - DNA, 25 bp, probe
tactgggccctgagtctgggcagct

SEQ ID NO: 287890 - DNA, 25 bp, probe
tacagggcccttttttgcaggcgat

SEQ ID NO: 287891 - DNA, 25 bp, probe
tacagggcccttttttgcaggcgat

SEQ ID NO: 287892 - DNA, 25 bp, probe
tacagggcccttttttgcaggcgat

SEQ ID NO: 287893 - DNA, 25 bp, probe
tacagggcccttttttgcaggcgat

SEQ ID NO: 287894 - DNA, 25 bp, probe
tacagaggccacacatggtccagac

SEQ ID NO: 287895 - DNA, 25 bp, probe
tacagaggccacacatggtccagac

SEQ ID NO: 287896 - DNA, 25 bp, probe
taaatggacagcctttgtcaagact

SEQ ID NO: 287897 - DNA, 25 bp, probe
taaaggtgactcggatgctcaagaa

SEQ ID NO: 287898 - DNA, 25 bp, probe
tacaaaggactctgagccacaaggg

SEQ ID NO: 287899 - DNA, 25 bp, probe
tactagcagagagtcctgagccact

SEQ ID NO: 287900 - DNA, 25 bp, probe
tactggcgaatcttgaacccgggtg

SEQ ID NO: 287901 - DNA, 25 bp, probe
tactgagtggtacaagccttgggga

SEQ ID NO: 287902 - DNA, 25 bp, probe
taccagctggttcgaaaattaggcc

SEQ ID NO: 287903 - DNA, 25 bp, probe
taccagctggttcgaaaattaggcc

SEQ ID NO: 287904 - DNA, 25 bp, probe
ttcccgggtcgacgatttcgtggag

SEQ ID NO: 287905 - DNA, 25 bp, probe
tacccaaggtcgtgttttggagcgg

SEQ ID NO: 287906 - DNA, 25 bp, probe
tacccaaggtcgtgttttggagcgg

SEQ ID NO: 287907 - DNA, 25 bp, probe
tacccaaggtcgtgttttggagcgg

SEQ ID NO: 287908 - DNA, 25 bp, probe
tacccaaggtcgtgttttggagcgg

SEQ ID NO: 287909 - DNA, 25 bp, probe
tacttaattgttcatgttttcagag

SEQ ID NO: 287910 - DNA, 25 bp, probe
ttcggacttctacatggctcctgaa

SEQ ID NO: 287911 - DNA, 25 bp, probe
tacaggaagtcccttgccatcctaa

SEQ ID NO: 287912 - DNA, 25 bp, probe
tacagagacgtcagtccctttgacc

SEQ ID NO: 287913 - DNA, 25 bp, probe
tacaccacagtaattcctatgttga

SEQ ID NO: 287914 - DNA, 25 bp, probe
tacaccacagtaattcctatgttga

SEQ ID NO: 287915 - DNA, 25 bp, probe
taccctagctacaccttcagtggtg

SEQ ID NO: 287916 - DNA, 25 bp, probe
tacctgctacgagaacttcaccgat

SEQ ID NO: 287917 - DNA, 25 bp, probe
tacctgctacgagaacttcaccgat

SEQ ID NO: 287918 - DNA, 25 bp, probe
tacagtgtgacgtgtactgtcaaaa

SEQ ID NO: 287919 - DNA, 25 bp, probe
tacaaagaggtgctcagcttcaagc

SEQ ID NO: 287920 - DNA, 25 bp, probe
tacactgactggctcagcgtgtgcc

SEQ ID NO: 287921 - DNA, 25 bp, probe
tacacatcctgaagatctcgtgact

SEQ ID NO: 287922 - DNA, 25 bp, probe
tacagaagctgtactcatcggcacg

SEQ ID NO: 287923 - DNA, 25 bp, probe
tacagcctttcaagcagaggacaga

SEQ ID NO: 287924 - DNA, 25 bp, probe
tacagccttacaaagatttctgcag

SEQ ID NO: 287925 - DNA, 25 bp, probe
tacaactcgaaaggtatttcaggtg

SEQ ID NO: 287926 - DNA, 25 bp, probe
tatcaaccgaagacgatttcaacaa

SEQ ID NO: 287927 - DNA, 25 bp, probe
taaatgccaaacatgttgtcacaca

SEQ ID NO: 287928 - DNA, 25 bp, probe
taaatgccaaacatgttgtcacaca

SEQ ID NO: 287929 - DNA, 25 bp, probe
taaatgtgacaacatctttatcacc

SEQ ID NO: 287930 - DNA, 25 bp, probe
taaagtaaatgctacctctgatcaa

SEQ ID NO: 287931 - DNA, 25 bp, probe
taaagtaaatgctacctctgatcaa

SEQ ID NO: 287932 - DNA, 25 bp, probe
tacagagaacacaagagccttacag

SEQ ID NO: 287933 - DNA, 25 bp, probe
taaagtgctcacgagagcgcccatc

SEQ ID NO: 287934 - DNA, 25 bp, probe
taaagtgctcacgagagcgcccatc

SEQ ID NO: 287935 - DNA, 25 bp, probe
tacaaggtcatcctgggtgcacacc

SEQ ID NO: 287936 - DNA, 25 bp, probe
tacacagtacgcctgggagaccaca

SEQ ID NO: 287937 - DNA, 25 bp, probe
tacatttaattgcaggagacacact

SEQ ID NO: 287938 - DNA, 25 bp, probe
tacactgtgttacatgagagagcca

SEQ ID NO: 287939 - DNA, 25 bp, probe
tacacatgtgttgcccagaatgtcc

SEQ ID NO: 287940 - DNA, 25 bp, probe
tacaaatgttgaggcctaattctga

SEQ ID NO: 287941 - DNA, 25 bp, probe
taaatatgtttccctatgtgtgtgt

SEQ ID NO: 287942 - DNA, 25 bp, probe
taaaggcatgtttgactttgtggtg

SEQ ID NO: 287943 - DNA, 25 bp, probe
taaattctccattatgttcgtggtg

SEQ ID NO: 287944 - DNA, 25 bp, probe
tacagatttcctgatcccgatgtta

SEQ ID NO: 287945 - DNA, 25 bp, probe
tacacacttgggatcccggatgtca

SEQ ID NO: 287946 - DNA, 25 bp, probe
tactcctgtgggactcccatggttg

SEQ ID NO: 287947 - DNA, 25 bp, probe
tactcaggttcagggcccgagattg

SEQ ID NO: 287948 - DNA, 25 bp, probe
tactcaggtttcagagcccaagtca

SEQ ID NO: 287949 - DNA, 25 bp, probe
tacacatgtgttatctacctcaagg

SEQ ID NO: 287950 - DNA, 25 bp, probe
tacacatgtggtactctgagctcct

SEQ ID NO: 287951 - DNA, 25 bp, probe
tacagctagctgttgctctggtatt

SEQ ID NO: 287952 - DNA, 25 bp, probe
tacacatactttctgttgactttat

SEQ ID NO: 287953 - DNA, 25 bp, probe
tacacatactttctgttgactttat

SEQ ID NO: 287954 - DNA, 25 bp, probe
tactaagtgtctcctgtaattttca

SEQ ID NO: 287955 - DNA, 25 bp, probe
tactaagtgtctcctgtaattttca

SEQ ID NO: 287956 - DNA, 25 bp, probe
taaattgctgttccttaatttgatt

SEQ ID NO: 287957 - DNA, 25 bp, probe
tacagttgcttatattttttgtttt

SEQ ID NO: 287958 - DNA, 25 bp, probe
tacagttggttcatccctttttctg

SEQ ID NO: 287959 - DNA, 25 bp, probe
tacagtgggggcatttctttatatc

SEQ ID NO: 287960 - DNA, 25 bp, probe
tacactgggggaacgtgctcttaaa

SEQ ID NO: 287961 - DNA, 25 bp, probe
taccggaggggagctctttgatcga

SEQ ID NO: 287962 - DNA, 25 bp, probe
taccgccggggagccagaagatgga

SEQ ID NO: 287963 - DNA, 25 bp, probe
tagccggccagtcgaggctacagga

SEQ ID NO: 287964 - DNA, 25 bp, probe
taaaggcactgtcagagaatctgga

SEQ ID NO: 287965 - DNA, 25 bp, probe
taaagtcatttatgagacagctcat

SEQ ID NO: 287966 - DNA, 25 bp, probe
tacaactcattcacagagctcgccc

SEQ ID NO: 287967 - DNA, 25 bp, probe
tactgactgcttgctaggtagcctc

SEQ ID NO: 287968 - DNA, 25 bp, probe
tactacgcttgctgaagttcactgc

SEQ ID NO: 287969 - DNA, 25 bp, probe
tacactcaagtgtgcaagttcacca

SEQ ID NO: 287970 - DNA, 25 bp, probe
tacatctacttcttccagtatagaa

SEQ ID NO: 287971 - DNA, 25 bp, probe
tacagcattttcttcacgaaacaaa

SEQ ID NO: 287972 - DNA, 25 bp, probe
tactgctcttactgcaggaagttta

SEQ ID NO: 287973 - DNA, 25 bp, probe
tactactgtgataccaagaaactta

SEQ ID NO: 287974 - DNA, 25 bp, probe
tacacactcaaatcaagaaacttaa

SEQ ID NO: 287975 - DNA, 25 bp, probe
tacaacctcatttcaaagaagtaca

SEQ ID NO: 287976 - DNA, 25 bp, probe
tacaatcgctctctagacatgtggt

SEQ ID NO: 287977 - DNA, 25 bp, probe
tacaatatgcctgttatctgtggcg

SEQ ID NO: 287978 - DNA, 25 bp, probe
taaatattatttgatcgtggctgtc

SEQ ID NO: 287979 - DNA, 25 bp, probe
taaatattatttgatcgtggctgtc

SEQ ID NO: 287980 - DNA, 25 bp, probe
taaatattacttaatcaggcctgat

SEQ ID NO: 287981 - DNA, 25 bp, probe
taaatttaaaagtcagcagcacaga

SEQ ID NO: 287982 - DNA, 25 bp, probe
taaattgttcaagtagccccagatt

SEQ ID NO: 287983 - DNA, 25 bp, probe
taaattgttcaagtagccccagatt

SEQ ID NO: 287984 - DNA, 25 bp, probe
tagacattttaagaaccagagccat

SEQ ID NO: 287985 - DNA, 25 bp, probe
tatttttgtaactaactaactgctg

SEQ ID NO: 287986 - DNA, 25 bp, probe
tatttctagttattacccagagttt

SEQ ID NO: 287987 - DNA, 25 bp, probe
tatttgtacaaatactgcctagtgt

SEQ ID NO: 287988 - DNA, 25 bp, probe
tatttgtacaaatactgcctagtgt

SEQ ID NO: 287989 - DNA, 25 bp, probe
tatcttacgaaaaaatggtagcatt

SEQ ID NO: 287990 - DNA, 25 bp, probe
tacttactaaaggccgctgaagctg

SEQ ID NO: 287991 - DNA, 25 bp, probe
tacagtatttaagtgcccataaggc

SEQ ID NO: 287992 - DNA, 25 bp, probe
tacagtatttaagtgcccataaggc

SEQ ID NO: 287993 - DNA, 25 bp, probe
tacactgcctcttagcagcctaaag

SEQ ID NO: 287994 - DNA, 25 bp, probe
tacttcctcatcgagcgcggaaaga

SEQ ID NO: 287995 - DNA, 25 bp, probe
tacatgacctaggggaggcctaaaa

SEQ ID NO: 287996 - DNA, 25 bp, probe
tactcaccagaagggggcttaccaa

SEQ ID NO: 287997 - DNA, 25 bp, probe
tactctgcacgaactcgaccgatac

SEQ ID NO: 287998 - DNA, 25 bp, probe
tactctgcacgaactcgaccgatac

SEQ ID NO: 287999 - DNA, 25 bp, probe
tacatctactgatgctagacacttg

SEQ ID NO: 288000 - DNA, 25 bp, probe
tactgcctgtagtctgatgacgata

SEQ ID NO: 288001 - DNA, 25 bp, probe
tactcttgtcagacaatggctataa

SEQ ID NO: 288002 - DNA, 25 bp, probe
tactttctcttgaatatgctacaca

SEQ ID NO: 288003 - DNA, 25 bp, probe
tacatatgtctctttttcctaatcc

SEQ ID NO: 288004 - DNA, 25 bp, probe
tacatacccagagttatactcaagc

SEQ ID NO: 288005 - DNA, 25 bp, probe
tacacccctgctggcagaagtacct

SEQ ID NO: 288006 - DNA, 25 bp, probe
tacagaaccctggggaatacagcca

SEQ ID NO: 288007 - DNA, 25 bp, probe
tacagcaacctacgggagaccgata

SEQ ID NO: 288008 - DNA, 25 bp, probe
tacagctttctcggggagaccttca

SEQ ID NO: 288009 - DNA, 25 bp, probe
tacgttcttcagggtcaaaattcag

SEQ ID NO: 288010 - DNA, 25 bp, probe
tacatgttttcctctcgaaagccag

SEQ ID NO: 288011 - DNA, 25 bp, probe
tacatgttttcctctcgaaagccag

SEQ ID NO: 288012 - DNA, 25 bp, probe
tacctgtttgcctccaagagactat

SEQ ID NO: 288013 - DNA, 25 bp, probe
tactttattaattccaagggcatac

SEQ ID NO: 288014 - DNA, 25 bp, probe
tacagtttttagtcaaagtggccat

SEQ ID NO: 288015 - DNA, 25 bp, probe
tacagttcttgttgtgaccagtgga

SEQ ID NO: 288016 - DNA, 25 bp, probe
tacagttcttgttgtgaccagtgga

SEQ ID NO: 288017 - DNA, 25 bp, probe
tacagtggcgattattaccgccaag

SEQ ID NO: 288018 - DNA, 25 bp, probe
tacagatgggatcaagggctccaca

SEQ ID NO: 288019 - DNA, 25 bp, probe
tacaagggccaaacagccatccatg

SEQ ID NO: 288020 - DNA, 25 bp, probe
tacagcaagacggaaacctcccttt

SEQ ID NO: 288021 - DNA, 25 bp, probe
ttcagctggccagcaaactttcctt

SEQ ID NO: 288022 - DNA, 25 bp, probe
tacaggagctgagagaccctaccct

SEQ ID NO: 288023 - DNA, 25 bp, probe
tacagtatgtggggacacccatggc

SEQ ID NO: 288024 - DNA, 25 bp, probe
tatctctttgaggatgaccccagcg

SEQ ID NO: 288025 - DNA, 25 bp, probe
tactgctctgtgactacccaggcag

SEQ ID NO: 288026 - DNA, 25 bp, probe
tacctgctgcgtcacctacgcagga

SEQ ID NO: 288027 - DNA, 25 bp, probe
tactgtgtcttggaatctagccgat

SEQ ID NO: 288028 - DNA, 25 bp, probe
tagcattgatcattgaactgctggg

SEQ ID NO: 288029 - DNA, 25 bp, probe
tactaatattattcctggtctttgg

SEQ ID NO: 288030 - DNA, 25 bp, probe
tacaatatcattttcctgggagtgg

SEQ ID NO: 288031 - DNA, 25 bp, probe
tagaaacaagttctagggtgggttg

SEQ ID NO: 288032 - DNA, 25 bp, probe
tagatcaacaattctttttgggggt

SEQ ID NO: 288033 - DNA, 25 bp, probe
taaatatcaaaaatctgttgggtgc

SEQ ID NO: 288034 - DNA, 25 bp, probe
tacaaacatacagccatctggggtc

SEQ ID NO: 288035 - DNA, 25 bp, probe
tactaactaccagcattgagaacat

SEQ ID NO: 288036 - DNA, 25 bp, probe
tatcattattacctcaattataaat

SEQ ID NO: 288037 - DNA, 25 bp, probe
tatcattattacctcaattataaat

SEQ ID NO: 288038 - DNA, 25 bp, probe
tacaatttgacggagcttgatacca

SEQ ID NO: 288039 - DNA, 25 bp, probe
tacaagttccaccagcattgttcct

SEQ ID NO: 288040 - DNA, 25 bp, probe
tacagcagttctacgacctgctctc

SEQ ID NO: 288041 - DNA, 25 bp, probe
tacagcgtataggtgcagccctgtc

SEQ ID NO: 288042 - DNA, 25 bp, probe
tacagcgccagagtgctgacgcctt

SEQ ID NO: 288043 - DNA, 25 bp, probe
tacagatccagagtcaggccatctc

SEQ ID NO: 288044 - DNA, 25 bp, probe
tacatcatctcattaaggccattcc

SEQ ID NO: 288045 - DNA, 25 bp, probe
tacatgttgcttccagacatacttc

SEQ ID NO: 288046 - DNA, 25 bp, probe
tacagtctctgttaaaactacagta

SEQ ID NO: 288047 - DNA, 25 bp, probe
tacaggccattacaatggtaaggaa

SEQ ID NO: 288048 - DNA, 25 bp, probe
tacagaacattcaggatatgtcaat

SEQ ID NO: 288049 - DNA, 25 bp, probe
tacaggatctttcagatcatgtgca

SEQ ID NO: 288050 - DNA, 25 bp, probe
tacatgtatctgaggcagctattcc

SEQ ID NO: 288051 - DNA, 25 bp, probe
tactttctacgtggcatttttctcc

SEQ ID NO: 288052 - DNA, 25 bp, probe
tacttttctttggcactcttactgc

SEQ ID NO: 288053 - DNA, 25 bp, probe
tacttttctttggcactcttactgc

SEQ ID NO: 288054 - DNA, 25 bp, probe
tactagtactgtgtactgtatagac

SEQ ID NO: 288055 - DNA, 25 bp, probe
tactactactgcttcatcacgttga

SEQ ID NO: 288056 - DNA, 25 bp, probe
tacaatctgactgtctcttgggaga

SEQ ID NO: 288057 - DNA, 25 bp, probe
tacactgctatggaggacttgggag

SEQ ID NO: 288058 - DNA, 25 bp, probe
tacactgaacagttactccgtggcc

SEQ ID NO: 288059 - DNA, 25 bp, probe
tacagctaaagtcatcaccgaccct

SEQ ID NO: 288060 - DNA, 25 bp, probe
tacagagtaagttattctagacctc

SEQ ID NO: 288061 - DNA, 25 bp, probe
tacagcgtggacaaatctctcagcc

SEQ ID NO: 288062 - DNA, 25 bp, probe
tacagcgtggacaaatctctcagcc

SEQ ID NO: 288063 - DNA, 25 bp, probe
taccagctgctgactaatcttcatc

SEQ ID NO: 288064 - DNA, 25 bp, probe
tacaagtgttctcacctcattgctg

SEQ ID NO: 288065 - DNA, 25 bp, probe
tacagtggttcatatcccatggcta

SEQ ID NO: 288066 - DNA, 25 bp, probe
tacactggactctaagccacttctt

SEQ ID NO: 288067 - DNA, 25 bp, probe
tacagaagacctagcagaacttatt

SEQ ID NO: 288068 - DNA, 25 bp, probe
tacaacagcgccttcaagaacttct

SEQ ID NO: 288069 - DNA, 25 bp, probe
tacatactgtgcatataatgaattt

SEQ ID NO: 288070 - DNA, 25 bp, probe
tacacagtgagcatcaccagtttta

SEQ ID NO: 288071 - DNA, 25 bp, probe
tacacagtgaaattgtctttatatc

SEQ ID NO: 288072 - DNA, 25 bp, probe
tacaaattgtattgcttattcatta

SEQ ID NO: 288073 - DNA, 25 bp, probe
tacacacacactttgtctagctcac

SEQ ID NO: 288074 - DNA, 25 bp, probe
tacacgacacacatgtctcgtccgt

SEQ ID NO: 288075 - DNA, 25 bp, probe
tacacgacacacatgtctcgtccgt

SEQ ID NO: 288076 - DNA, 25 bp, probe
tacagctgaaacaagcttcctcatg

SEQ ID NO: 288077 - DNA, 25 bp, probe
tacagcttggatcgagcttcctgca

SEQ ID NO: 288078 - DNA, 25 bp, probe
tacagcatctggaaccttctgctca

SEQ ID NO: 288079 - DNA, 25 bp, probe
tacatgcattgcccacatttgtgtc

SEQ ID NO: 288080 - DNA, 25 bp, probe
tactgcctgcgcaatcaagaggtca

SEQ ID NO: 288081 - DNA, 25 bp, probe
tactcctctgacgaatgggtatatt

SEQ ID NO: 288082 - DNA, 25 bp, probe
tacacctgtgaccaaggcttatgtg

SEQ ID NO: 288083 - DNA, 25 bp, probe
tacaccgtgcacctgggcagtgata

SEQ ID NO: 288084 - DNA, 25 bp, probe
tacaagccgcaaaggcagcaggcta

SEQ ID NO: 288085 - DNA, 25 bp, probe
tacagcagccgcatgagctggggaa

SEQ ID NO: 288086 - DNA, 25 bp, probe
tacagcatgcgcagtagccggaaat

SEQ ID NO: 288087 - DNA, 25 bp, probe
tacagcatgcgcagtagccggaaat

SEQ ID NO: 288088 - DNA, 25 bp, probe
tacagagcgggatgccgtcaggatc

SEQ ID NO: 288089 - DNA, 25 bp, probe
tacaggcggaaggcctgggctggcg

SEQ ID NO: 288090 - DNA, 25 bp, probe
tacgtgcaggaagagcggctttgat

SEQ ID NO: 288091 - DNA, 25 bp, probe
tacttggtgaaggagcgggctttgg

SEQ ID NO: 288092 - DNA, 25 bp, probe
tactctgggtcagacctgaggttgg

SEQ ID NO: 288093 - DNA, 25 bp, probe
tacatcagtaaaataccatacgtat

SEQ ID NO: 288094 - DNA, 25 bp, probe
tacacagagtacaattaaaccataa

SEQ ID NO: 288095 - DNA, 25 bp, probe
tacacagagtacaattaaaccataa

SEQ ID NO: 288096 - DNA, 25 bp, probe
tacatcggacacaattcagaattca

SEQ ID NO: 288097 - DNA, 25 bp, probe
tacacaaagacttcaacaattgcac

SEQ ID NO: 288098 - DNA, 25 bp, probe
tacatacaagacttcaccataaggc

SEQ ID NO: 288099 - DNA, 25 bp, probe
tacatacggaagtctccaaagggtc

SEQ ID NO: 288100 - DNA, 25 bp, probe
tacaagccaaacgcaaaaggttgct

SEQ ID NO: 288101 - DNA, 25 bp, probe
taccccaaaaccaacaaggatggct

SEQ ID NO: 288102 - DNA, 25 bp, probe
tacgcccaggttccggaaggtggtg

SEQ ID NO: 288103 - DNA, 25 bp, probe
tactccaaggttctggaggcccatt

SEQ ID NO: 288104 - DNA, 25 bp, probe
tactttaggactccagaattccact

SEQ ID NO: 288105 - DNA, 25 bp, probe
tacttcagggatttgccaattccac

SEQ ID NO: 288106 - DNA, 25 bp, probe
tacccaagtacattctaattaccag

SEQ ID NO: 288107 - DNA, 25 bp, probe
ttgcccgggacatctacaaagaccc

SEQ ID NO: 288108 - DNA, 25 bp, probe
ttcccaggaatatcccaaacttcgg

SEQ ID NO: 288109 - DNA, 25 bp, probe
tactccaggactgtctccataacat

SEQ ID NO: 288110 - DNA, 25 bp, probe
taccacggattctctttaatattgt

SEQ ID NO: 288111 - DNA, 25 bp, probe
taccacggattctctttaatattgt

SEQ ID NO: 288112 - DNA, 25 bp, probe
tacacaaggattatgcatttttttt

SEQ ID NO: 288113 - DNA, 25 bp, probe
tacacaatggttttcttgtgtgttt

SEQ ID NO: 288114 - DNA, 25 bp, probe
tacacgtgtgcttggttttgccttt

SEQ ID NO: 288115 - DNA, 25 bp, probe
tacacactgtcatgcttcatcattc

SEQ ID NO: 288116 - DNA, 25 bp, probe
tacatcactgtttggtatgaccccg

SEQ ID NO: 288117 - DNA, 25 bp, probe
tacacatcgtatggggtgacaccgc

SEQ ID NO: 288118 - DNA, 25 bp, probe
tacacaatgttggctggctacactc

SEQ ID NO: 288119 - DNA, 25 bp, probe
tactgagacttgcctgcactgatac

SEQ ID NO: 288120 - DNA, 25 bp, probe
tacgagaaaagcccatgacgcccta

SEQ ID NO: 288121 - DNA, 25 bp, probe
tacaggacaatgaccctatcccctg

SEQ ID NO: 288122 - DNA, 25 bp, probe
tacaggacaatgaccctatcccctg

SEQ ID NO: 288123 - DNA, 25 bp, probe
tacagaagccagactgggtcccgcg

SEQ ID NO: 288124 - DNA, 25 bp, probe
tacagaagctgcatcctgagacccg

SEQ ID NO: 288125 - DNA, 25 bp, probe
tacaaatgctgcatttctttctccc

SEQ ID NO: 288126 - DNA, 25 bp, probe
tactaatagtttgcttccttcctta

SEQ ID NO: 288127 - DNA, 25 bp, probe
tacaacattttgcagttccttccta

SEQ ID NO: 288128 - DNA, 25 bp, probe
tacatcctttagcagatgggctcat

SEQ ID NO: 288129 - DNA, 25 bp, probe
tacaacttcatccgaagcatggccg

SEQ ID NO: 288130 - DNA, 25 bp, probe
tacaactgtgcggccaagatgctcc

SEQ ID NO: 288131 - DNA, 25 bp, probe
tacagctctcctagacaagactcgc

SEQ ID NO: 288132 - DNA, 25 bp, probe
tactgcgctctcagtcagatactgc

SEQ ID NO: 288133 - DNA, 25 bp, probe
tacattatgctcagtggacgctccc

SEQ ID NO: 288134 - DNA, 25 bp, probe
tacattatgctcagtggacgctccc

SEQ ID NO: 288135 - DNA, 25 bp, probe
tacattactattccataactccaga

SEQ ID NO: 288136 - DNA, 25 bp, probe
tacattactattccataactccaga

SEQ ID NO: 288137 - DNA, 25 bp, probe
tacaaacaaaacacatcccagacat

SEQ ID NO: 288138 - DNA, 25 bp, probe
taaattcagaattaactccttcaat

SEQ ID NO: 288139 - DNA, 25 bp, probe
tacaattccatcatcaaccctgtca

SEQ ID NO: 288140 - DNA, 25 bp, probe
tacaatgaaatagtcgacacctgtt

SEQ ID NO: 288141 - DNA, 25 bp, probe
tacaagacattatagagcacctgaa

SEQ ID NO: 288142 - DNA, 25 bp, probe
tacaagcacaaatctaaccatgagc

SEQ ID NO: 288143 - DNA, 25 bp, probe
tacaagcacaaatctaaccatgagc

SEQ ID NO: 288144 - DNA, 25 bp, probe
tacagagcaaacaacaacaccatgg

SEQ ID NO: 288145 - DNA, 25 bp, probe
tacagagcaaacaacaacaccatgg

SEQ ID NO: 288146 - DNA, 25 bp, probe
tacagagacaaaacggcctccggct

SEQ ID NO: 288147 - DNA, 25 bp, probe
tacagagacaaaacggcctccggct

SEQ ID NO: 288148 - DNA, 25 bp, probe
tacaggcagaatcccaggactccgg

SEQ ID NO: 288149 - DNA, 25 bp, probe
tacagagcgtatagcctggtgctgg

SEQ ID NO: 288150 - DNA, 25 bp, probe
tacaatcgtttcatcattcggcgtg

SEQ ID NO: 288151 - DNA, 25 bp, probe
tacaggcccttcaatatccatggag

SEQ ID NO: 288152 - DNA, 25 bp, probe
tacaggctctttaatccatctggaa

SEQ ID NO: 288153 - DNA, 25 bp, probe
tacaggctctttaatccatctggaa

SEQ ID NO: 288154 - DNA, 25 bp, probe
tacacttccttaactgcacgatatt

SEQ ID NO: 288155 - DNA, 25 bp, probe
tacacagattctcaacgacccatat

SEQ ID NO: 288156 - DNA, 25 bp, probe
tacacagattctcaacgacccatat

SEQ ID NO: 288157 - DNA, 25 bp, probe
tactagtttgctttgctgaccaaat

SEQ ID NO: 288158 - DNA, 25 bp, probe
tactacttggactggatccaccact

SEQ ID NO: 288159 - DNA, 25 bp, probe
tacacaaagaactggatcaccccag

SEQ ID NO: 288160 - DNA, 25 bp, probe
tactgaaaggacttgattacctcca

SEQ ID NO: 288161 - DNA, 25 bp, probe
tacagtaaggacagtctctgcttcc

SEQ ID NO: 288162 - DNA, 25 bp, probe
tactccaagagtaagttctgctacc

SEQ ID NO: 288163 - DNA, 25 bp, probe
tacactcatggggaagcttccatga

SEQ ID NO: 288164 - DNA, 25 bp, probe
tacactctgtgttattgcatctccg

SEQ ID NO: 288165 - DNA, 25 bp, probe
tacaccattttaggcattacatttt

SEQ ID NO: 288166 - DNA, 25 bp, probe
tacagactgtatcagtctaattttt

SEQ ID NO: 288167 - DNA, 25 bp, probe
tacacagattatacagctctaagga

SEQ ID NO: 288168 - DNA, 25 bp, probe
tacacagctttatgatatcaaagac

SEQ ID NO: 288169 - DNA, 25 bp, probe
tacaagattctgcacctcaaagggg

SEQ ID NO: 288170 - DNA, 25 bp, probe
tacaagattctgcacctcaaagggg

SEQ ID NO: 288171 - DNA, 25 bp, probe
tactagactgagcatcccgaaggag

SEQ ID NO: 288172 - DNA, 25 bp, probe
tacatggactacgcccaagcaaggt

SEQ ID NO: 288173 - DNA, 25 bp, probe
tacagcaactacagcgtgaacgggg

SEQ ID NO: 288174 - DNA, 25 bp, probe
tacagcaactacagcgtgaacgggg

SEQ ID NO: 288175 - DNA, 25 bp, probe
tacagccactacttgggaacacagg

SEQ ID NO: 288176 - DNA, 25 bp, probe
tacaggacgcgctggcgagatgctc

SEQ ID NO: 288177 - DNA, 25 bp, probe
tacaagggccacctggagatcatcc

SEQ ID NO: 288178 - DNA, 25 bp, probe
tacaaggactcatctgtggtccctg

SEQ ID NO: 288179 - DNA, 25 bp, probe
tacaagggatcagcttttcccagcc

SEQ ID NO: 288180 - DNA, 25 bp, probe
tacaggttcttggtgttacccagcc

SEQ ID NO: 288181 - DNA, 25 bp, probe
tacaggttcttggtgttacccagcc

SEQ ID NO: 288182 - DNA, 25 bp, probe
tacaggttcttggtgttacccagcc

SEQ ID NO: 288183 - DNA, 25 bp, probe
tacatttctttcgtgttcaaaccac

SEQ ID NO: 288184 - DNA, 25 bp, probe
tacatttctttcgtgttcaaaccac

SEQ ID NO: 288185 - DNA, 25 bp, probe
tacatttcattaccttaaaaagcca

SEQ ID NO: 288186 - DNA, 25 bp, probe
tacatttcattaccttaaaaagcca

SEQ ID NO: 288187 - DNA, 25 bp, probe
tacatgttattgttttcaacctaga

SEQ ID NO: 288188 - DNA, 25 bp, probe
tacatgttattgttttcaacctaga

SEQ ID NO: 288189 - DNA, 25 bp, probe
tacattttcaagattaggccataat

SEQ ID NO: 288190 - DNA, 25 bp, probe
tatatttcccatatttcaggtgaat

SEQ ID NO: 288191 - DNA, 25 bp, probe
tacaggtacctctcttagggactct

SEQ ID NO: 288192 - DNA, 25 bp, probe
tattggtacctctcatttgggcacc

SEQ ID NO: 288193 - DNA, 25 bp, probe
tacatggtacctgagttctgcttcc

SEQ ID NO: 288194 - DNA, 25 bp, probe
tacatttgaactgagaacccctttt

SEQ ID NO: 288195 - DNA, 25 bp, probe
tacatttgaactgagaacccctttt

SEQ ID NO: 288196 - DNA, 25 bp, probe
tatcattgtgaacaaggcccccttg

SEQ ID NO: 288197 - DNA, 25 bp, probe
tacttctaaggatgccccaacctga

SEQ ID NO: 288198 - DNA, 25 bp, probe
tacattctgaagcatccccaattca

SEQ ID NO: 288199 - DNA, 25 bp, probe
tacattagacagtatcagccaaaat

SEQ ID NO: 288200 - DNA, 25 bp, probe
tacagctcagactattacaataaca

SEQ ID NO: 288201 - DNA, 25 bp, probe
tacggctacttcaacgagaacttcc

SEQ ID NO: 288202 - DNA, 25 bp, probe
tacagcctacgagaaggaatgcttc

SEQ ID NO: 288203 - DNA, 25 bp, probe
tacagcactgactactacaggttct

SEQ ID NO: 288204 - DNA, 25 bp, probe
tacagcactgactactacaggttct

SEQ ID NO: 288205 - DNA, 25 bp, probe
tacagagggtgactccaggttccac

SEQ ID NO: 288206 - DNA, 25 bp, probe
tacaggcaggtgctggcattgttgc

SEQ ID NO: 288207 - DNA, 25 bp, probe
tacagatcagactgatgatttggct

SEQ ID NO: 288208 - DNA, 25 bp, probe
tacatgatcatgcgggagtgctggc

SEQ ID NO: 288209 - DNA, 25 bp, probe
tacagttcaatggacgctgtggctc

SEQ ID NO: 288210 - DNA, 25 bp, probe
tacagccatatgagtgcctcggtgc

SEQ ID NO: 288211 - DNA, 25 bp, probe
tacagcattataaccccggtgctct

SEQ ID NO: 288212 - DNA, 25 bp, probe
tacagcattataaccccggtgctct

SEQ ID NO: 288213 - DNA, 25 bp, probe
tacagtagcacaaccctggtggctc

SEQ ID NO: 288214 - DNA, 25 bp, probe
tacagaatggctcctcgggatggtc

SEQ ID NO: 288215 - DNA, 25 bp, probe
tacaagcatgcccaatcttagagac

SEQ ID NO: 288216 - DNA, 25 bp, probe
tactcagattgccagctttaagact

SEQ ID NO: 288217 - DNA, 25 bp, probe
tacttgaatggacctctataaacgc

SEQ ID NO: 288218 - DNA, 25 bp, probe
tacacgagatcctctctctgaaatc

SEQ ID NO: 288219 - DNA, 25 bp, probe
tacaccagacctttctcctgaaggt

SEQ ID NO: 288220 - DNA, 25 bp, probe
tacacatacgtattttccgtagtgc

SEQ ID NO: 288221 - DNA, 25 bp, probe
tacacatcaggttgtaaccaggtgg

SEQ ID NO: 288222 - DNA, 25 bp, probe
tacaactgggtgaaagcccggcgac

SEQ ID NO: 288223 - DNA, 25 bp, probe
tacaactgggtgaaagcccggcgac

SEQ ID NO: 288224 - DNA, 25 bp, probe
tacaactgggtgaaagcccggcgac

SEQ ID NO: 288225 - DNA, 25 bp, probe
tacaccagggtaaacaccagtgaac

SEQ ID NO: 288226 - DNA, 25 bp, probe
tacaagttggtaaacacagccatta

SEQ ID NO: 288227 - DNA, 25 bp, probe
tacattggtgggtaacacagccatc

SEQ ID NO: 288228 - DNA, 25 bp, probe
tacagggtgtgacaacatgacctgc

SEQ ID NO: 288229 - DNA, 25 bp, probe
tacaggggtgacaagcctcacttct

SEQ ID NO: 288230 - DNA, 25 bp, probe
tactgtctgggagcagcttcaactg

SEQ ID NO: 288231 - DNA, 25 bp, probe
tacatgtattgctgctacttcaagc

SEQ ID NO: 288232 - DNA, 25 bp, probe
tagcattcactaagccctacatagg

SEQ ID NO: 288233 - DNA, 25 bp, probe
taccattataaccctacagaggtgg

SEQ ID NO: 288234 - DNA, 25 bp, probe
ttccactaggaccacccaaagtagg

SEQ ID NO: 288235 - DNA, 25 bp, probe
ttccactaggaccacccaaagtagg

SEQ ID NO: 288236 - DNA, 25 bp, probe
taccagaagtacgaccctaaggacg

SEQ ID NO: 288237 - DNA, 25 bp, probe
taggcgagggaggacctcaacccca

SEQ ID NO: 288238 - DNA, 25 bp, probe
tagtctggagcgacaacccaaggca

SEQ ID NO: 288239 - DNA, 25 bp, probe
tacacggagttcaagttccctcaga

SEQ ID NO: 288240 - DNA, 25 bp, probe
tacactggtggtttgtttcctagaa

SEQ ID NO: 288241 - DNA, 25 bp, probe
tacactggtggtttgtttcctagaa

SEQ ID NO: 288242 - DNA, 25 bp, probe
tacacggaaagcttatggccctaaa

SEQ ID NO: 288243 - DNA, 25 bp, probe
tacaccaaaaggaggcgctcttaat

SEQ ID NO: 288244 - DNA, 25 bp, probe
tacaccaaaaggaggcgctcttaat

SEQ ID NO: 288245 - DNA, 25 bp, probe
tacaaaacaacaacgacctaaagat

SEQ ID NO: 288246 - DNA, 25 bp, probe
tactaaagaatacaacctgctaagt

SEQ ID NO: 288247 - DNA, 25 bp, probe
tactcagaagacacctaccgattgg

SEQ ID NO: 288248 - DNA, 25 bp, probe
tactataacaacagtaccaaggtgg

SEQ ID NO: 288249 - DNA, 25 bp, probe
tactgaaaaacgaggccaatgaccc

SEQ ID NO: 288250 - DNA, 25 bp, probe
taccaacaaagcaggggagagaccc

SEQ ID NO: 288251 - DNA, 25 bp, probe
taccaacaaagcaggggagagaccc

SEQ ID NO: 288252 - DNA, 25 bp, probe
tacacaacggcgctggtggaggaca

SEQ ID NO: 288253 - DNA, 25 bp, probe
taccctgggggtgtggactgtgagt

SEQ ID NO: 288254 - DNA, 25 bp, probe
tacacttgggggtagcggggtcagg

SEQ ID NO: 288255 - DNA, 25 bp, probe
tacacttgcggagtacctgttggtt

SEQ ID NO: 288256 - DNA, 25 bp, probe
tacagcttcggcctaatcatttggg

SEQ ID NO: 288257 - DNA, 25 bp, probe
tacagcttcggcgtggttctgttgg

SEQ ID NO: 288258 - DNA, 25 bp, probe
tacagattcgcgtggggcgtggtca

SEQ ID NO: 288259 - DNA, 25 bp, probe
tacagaagccgaggacgtgcttggg

SEQ ID NO: 288260 - DNA, 25 bp, probe
tacaacacgcggcacgtgtgcggct

SEQ ID NO: 288261 - DNA, 25 bp, probe
tacacactctcgggttgttgggttt

SEQ ID NO: 288262 - DNA, 25 bp, probe
tacaacacctgtactttagagtttt

SEQ ID NO: 288263 - DNA, 25 bp, probe
tacaacacctgtactttagagtttt

SEQ ID NO: 288264 - DNA, 25 bp, probe
tacgtcacttttctatagttttgag

SEQ ID NO: 288265 - DNA, 25 bp, probe
tagttttttctagttagtgtttgag

SEQ ID NO: 288266 - DNA, 25 bp, probe
tatttattcccctttaggtttgcag

SEQ ID NO: 288267 - DNA, 25 bp, probe
tttatcctccctgttatactttgga

SEQ ID NO: 288268 - DNA, 25 bp, probe
ttcttccccactgtgttcgtgaagg

SEQ ID NO: 288269 - DNA, 25 bp, probe
tacttctaccctgtggtgaaggagc

SEQ ID NO: 288270 - DNA, 25 bp, probe
tagcttccacttggtgggtaaggcc

SEQ ID NO: 288271 - DNA, 25 bp, probe
tacttctcgtggctggttaccaaaa

SEQ ID NO: 288272 - DNA, 25 bp, probe
tacattctagttctggtgctctcta

SEQ ID NO: 288273 - DNA, 25 bp, probe
tacatctggatttttagtcattcta

SEQ ID NO: 288274 - DNA, 25 bp, probe
tacacatgcaggacgttagactgtt

SEQ ID NO: 288275 - DNA, 25 bp, probe
tactacacaggcctgataactctgt

SEQ ID NO: 288276 - DNA, 25 bp, probe
tatcgcaattgacggaaactttgac

SEQ ID NO: 288277 - DNA, 25 bp, probe
tatcttatgccacgggaagtttaga

SEQ ID NO: 288278 - DNA, 25 bp, probe
tacttacacaaggagaagaggattg

SEQ ID NO: 288279 - DNA, 25 bp, probe
tacttaacctgaagctagacgagca

SEQ ID NO: 288280 - DNA, 25 bp, probe
tagcttccccgtttggaagatccca

SEQ ID NO: 288281 - DNA, 25 bp, probe
tacagtccaatggtatgctggagag

SEQ ID NO: 288282 - DNA, 25 bp, probe
tacatctccagcatcaacgatgaga

SEQ ID NO: 288283 - DNA, 25 bp, probe
tacacccaaggccagcaatgcaagg

SEQ ID NO: 288284 - DNA, 25 bp, probe
tacagcccgacctacaaacaggaca

SEQ ID NO: 288285 - DNA, 25 bp, probe
tacattactgcagagaaacacggaa

SEQ ID NO: 288286 - DNA, 25 bp, probe
tacactgtacagtagcacaaccctg

SEQ ID NO: 288287 - DNA, 25 bp, probe
tacatgtgtaagtgccagacagctg

SEQ ID NO: 288288 - DNA, 25 bp, probe
tacattgtcaagggcaatgcccgcc

SEQ ID NO: 288289 - DNA, 25 bp, probe
tactaggcagggcccatggtcctgc

SEQ ID NO: 288290 - DNA, 25 bp, probe
tacttcaagggaccagagctcctcg

SEQ ID NO: 288291 - DNA, 25 bp, probe
tacattcaagtccttcaggccatct

SEQ ID NO: 288292 - DNA, 25 bp, probe
tacagtgaagtatttgaagccatca

SEQ ID NO: 288293 - DNA, 25 bp, probe
tacagtgaagtatttgaagccatca

SEQ ID NO: 288294 - DNA, 25 bp, probe
tacactcaaggatgtgaacctggac

SEQ ID NO: 288295 - DNA, 25 bp, probe
tacactcaaggctgagaggcctcag

SEQ ID NO: 288296 - DNA, 25 bp, probe
tacaccaactgtcaatgccggaatt

SEQ ID NO: 288297 - DNA, 25 bp, probe
tacacagagactgcccggcgagaat

SEQ ID NO: 288298 - DNA, 25 bp, probe
tacacagagactgcccggcgagaat

SEQ ID NO: 288299 - DNA, 25 bp, probe
tacagttgacgcggccggcgaattt

SEQ ID NO: 288300 - DNA, 25 bp, probe
tacgacccccgaaggcagatttgtg

SEQ ID NO: 288301 - DNA, 25 bp, probe
tacggacctcggaaagtattcctgg

SEQ ID NO: 288302 - DNA, 25 bp, probe
tacggacctcttaaagcacacccgt

SEQ ID NO: 288303 - DNA, 25 bp, probe
tacagaggcctctttactgaccaac

SEQ ID NO: 288304 - DNA, 25 bp, probe
tacatgaacgctttaggctactgga

SEQ ID NO: 288305 - DNA, 25 bp, probe
tacatgaacgctttaggctactgga

SEQ ID NO: 288306 - DNA, 25 bp, probe
tactcaacttataaactgtctgcag

SEQ ID NO: 288307 - DNA, 25 bp, probe
tacataacctatatacctccagcag

SEQ ID NO: 288308 - DNA, 25 bp, probe
tactgaacgccaaaacttccacatg

SEQ ID NO: 288309 - DNA, 25 bp, probe
tactgaacagcatcaatttcgacaa

SEQ ID NO: 288310 - DNA, 25 bp, probe
tacatcataagctccagccttgatc

SEQ ID NO: 288311 - DNA, 25 bp, probe
tacatcatgaccgtcactgactttg

SEQ ID NO: 288312 - DNA, 25 bp, probe
tacactgcatacccctggtttgcag

SEQ ID NO: 288313 - DNA, 25 bp, probe
tacacagatatccatgcctgtttta

SEQ ID NO: 288314 - DNA, 25 bp, probe
tacacagatgccttgcacgtttatt

SEQ ID NO: 288315 - DNA, 25 bp, probe
taccgacctttctgattagtaaaca

SEQ ID NO: 288316 - DNA, 25 bp, probe
tactagacctgtaacttttgtaaat

SEQ ID NO: 288317 - DNA, 25 bp, probe
tactagacctgtaacttttgtaaat

SEQ ID NO: 288318 - DNA, 25 bp, probe
tactcaaactttgtcctcgtgaaga

SEQ ID NO: 288319 - DNA, 25 bp, probe
tactcaaaaaaactactggatgcaa

SEQ ID NO: 288320 - DNA, 25 bp, probe
tacaccacaggacactactaatcta

SEQ ID NO: 288321 - DNA, 25 bp, probe
tacagccttggactagcaatttatg

SEQ ID NO: 288322 - DNA, 25 bp, probe
tacaccatggaacactatgtgtatt

SEQ ID NO: 288323 - DNA, 25 bp, probe
tacacctctgaacatgtgtgtgata

SEQ ID NO: 288324 - DNA, 25 bp, probe
tacacctctgaacatgtgtgtgata

SEQ ID NO: 288325 - DNA, 25 bp, probe
tacactatctaacatctggctgttg

SEQ ID NO: 288326 - DNA, 25 bp, probe
tacactttttacatgtgagattgga

SEQ ID NO: 288327 - DNA, 25 bp, probe
tacactttttacatgtgagattgga

SEQ ID NO: 288328 - DNA, 25 bp, probe
tacacctctttacgtatatgatgtg

SEQ ID NO: 288329 - DNA, 25 bp, probe
tactccctcaatatgtaaagttatc

SEQ ID NO: 288330 - DNA, 25 bp, probe
tatccccctggaagtttactattca

SEQ ID NO: 288331 - DNA, 25 bp, probe
tactcccacaggtgggcccatattc

SEQ ID NO: 288332 - DNA, 25 bp, probe
taccacatcaaatctgggcccaaac

SEQ ID NO: 288333 - DNA, 25 bp, probe
tactcctcaagcactggaacacgat

SEQ ID NO: 288334 - DNA, 25 bp, probe
tacacctcaccagtttgaacagttg

SEQ ID NO: 288335 - DNA, 25 bp, probe
tacatccacagggttttgacacttg

SEQ ID NO: 288336 - DNA, 25 bp, probe
tactctaccagttttctgacattgt

SEQ ID NO: 288337 - DNA, 25 bp, probe
tactttccgctgtgtccagatgttg

SEQ ID NO: 288338 - DNA, 25 bp, probe
tactttccgctgtgtccagatgttg

SEQ ID NO: 288339 - DNA, 25 bp, probe
tactttccgctgtgtccagatgttg

SEQ ID NO: 288340 - DNA, 25 bp, probe
tacatttcttgttaaccacgttatt

SEQ ID NO: 288341 - DNA, 25 bp, probe
tacatttcttgttaaccacgttatt

SEQ ID NO: 288342 - DNA, 25 bp, probe
tactttcgttaatcttgctgcttat

SEQ ID NO: 288343 - DNA, 25 bp, probe
tactttctattttaatcttgctact

SEQ ID NO: 288344 - DNA, 25 bp, probe
tacttgctttttccagagttattta

SEQ ID NO: 288345 - DNA, 25 bp, probe
tacttcattttttccctctaattat

SEQ ID NO: 288346 - DNA, 25 bp, probe
tacagtctaattgttcatcctaatt

SEQ ID NO: 288347 - DNA, 25 bp, probe
tacagtgctaaccacttctttcaat

SEQ ID NO: 288348 - DNA, 25 bp, probe
tacagtgctaaccacttctttcaat

SEQ ID NO: 288349 - DNA, 25 bp, probe
tacagtgccataaaccttgttacat

SEQ ID NO: 288350 - DNA, 25 bp, probe
tacatgtttttgtacttttactata

SEQ ID NO: 288351 - DNA, 25 bp, probe
tacatctctgtagttttatttttag

SEQ ID NO: 288352 - DNA, 25 bp, probe
tacacatttactggatcttttggat

SEQ ID NO: 288353 - DNA, 25 bp, probe
tacagtattactattttctaggata

SEQ ID NO: 288354 - DNA, 25 bp, probe
tacactttatccattattctactga

SEQ ID NO: 288355 - DNA, 25 bp, probe
tacttttatgacattctaatactaa

SEQ ID NO: 288356 - DNA, 25 bp, probe
tacttttgtcttatgctttactccc

SEQ ID NO: 288357 - DNA, 25 bp, probe
tactgtgggtttaagccttgcacct

SEQ ID NO: 288358 - DNA, 25 bp, probe
tacttggtagattatggccttgctt

SEQ ID NO: 288359 - DNA, 25 bp, probe
tacttggtatatgtgcccgtggtcg

SEQ ID NO: 288360 - DNA, 25 bp, probe
tatgctcggtttgctaccgggtgtg

SEQ ID NO: 288361 - DNA, 25 bp, probe
tttctggttctagtaatcctgggtg

SEQ ID NO: 288362 - DNA, 25 bp, probe
ttacggtttgggaatccagggctca

SEQ ID NO: 288363 - DNA, 25 bp, probe
tttcagggctaacgaccacagggtc

SEQ ID NO: 288364 - DNA, 25 bp, probe
tatccgaggctttgggcctaggggc

SEQ ID NO: 288365 - DNA, 25 bp, probe
tacacgaggtatgaggtctaggaac

SEQ ID NO: 288366 - DNA, 25 bp, probe
tactcgggcttgtgaggccggaatc

SEQ ID NO: 288367 - DNA, 25 bp, probe
tacactggagctgaggaggccggct

SEQ ID NO: 288368 - DNA, 25 bp, probe
tacactcgagctgacgaggccggct

SEQ ID NO: 288369 - DNA, 25 bp, probe
tacactcgagctgaggaggccggct

SEQ ID NO: 288370 - DNA, 25 bp, probe
tacactccagcctgggtgacagagt

SEQ ID NO: 288371 - DNA, 25 bp, probe
tacactccagcctgggtgacagagt

SEQ ID NO: 288372 - DNA, 25 bp, probe
tacatcccaggcagcgtggacaatt

SEQ ID NO: 288373 - DNA, 25 bp, probe
tagctacggtaaagtgtgcacacat

SEQ ID NO: 288374 - DNA, 25 bp, probe
tagctacggtaaagtgtgcacacat

SEQ ID NO: 288375 - DNA, 25 bp, probe
tactctaggttttggataccatgag

SEQ ID NO: 288376 - DNA, 25 bp, probe
tacttccagcgaaatggtaccaagg

SEQ ID NO: 288377 - DNA, 25 bp, probe
tacttccagcgaaatggtaccaagg

SEQ ID NO: 288378 - DNA, 25 bp, probe
tactcatccacatgaagggtacaca

SEQ ID NO: 288379 - DNA, 25 bp, probe
tactatacagactacgtggctacca

SEQ ID NO: 288380 - DNA, 25 bp, probe
tacttacagagcgtcctggatgatt

SEQ ID NO: 288381 - DNA, 25 bp, probe
tacgtgcaaacaacctgaatctttt

SEQ ID NO: 288382 - DNA, 25 bp, probe
tacatgtgcagatattcctaaagtt

SEQ ID NO: 288383 - DNA, 25 bp, probe
tacaggcgagttccctgtggcgttt

SEQ ID NO: 288384 - DNA, 25 bp, probe
tactgcgtgaggccctcagttggtc

SEQ ID NO: 288385 - DNA, 25 bp, probe
tactgagatctgggactgctttggt

SEQ ID NO: 288386 - DNA, 25 bp, probe
tacaggctatgcaatacctttggtc

SEQ ID NO: 288387 - DNA, 25 bp, probe
taccagtaagtgccacttctgtgtc

SEQ ID NO: 288388 - DNA, 25 bp, probe
taccagtaagtgccacttctgtgtc

SEQ ID NO: 288389 - DNA, 25 bp, probe
tactcacacggacaggttgatgcca

SEQ ID NO: 288390 - DNA, 25 bp, probe
tactcacacggacaggttgatgcca

SEQ ID NO: 288391 - DNA, 25 bp, probe
tactgatactttcaggggtggccca

SEQ ID NO: 288392 - DNA, 25 bp, probe
tactaacttctccgcaagttgtcct

SEQ ID NO: 288393 - DNA, 25 bp, probe
tactagcactttgagaatgagtctc

SEQ ID NO: 288394 - DNA, 25 bp, probe
tacgcccacctgtaaaggttcaagg

SEQ ID NO: 288395 - DNA, 25 bp, probe
tacgtcaacacgtacgggcgcatca

SEQ ID NO: 288396 - DNA, 25 bp, probe
tacttctaaattttgggagctcctc

SEQ ID NO: 288397 - DNA, 25 bp, probe
tacttaagactttatgggagagatt

SEQ ID NO: 288398 - DNA, 25 bp, probe
tactcttgggccagtgggggcagct

SEQ ID NO: 288399 - DNA, 25 bp, probe
tacatccggggctatggtggggagg

SEQ ID NO: 288400 - DNA, 25 bp, probe
tactccgagaagtactggaagggct

SEQ ID NO: 288401 - DNA, 25 bp, probe
tactcttgaaagtactcaagccagc

SEQ ID NO: 288402 - DNA, 25 bp, probe
tacatttgaagacaacatcactctg

SEQ ID NO: 288403 - DNA, 25 bp, probe
tagcaataaaacggatcaacttgga

SEQ ID NO: 288404 - DNA, 25 bp, probe
tacatcagaaaagcagtgaaattga

SEQ ID NO: 288405 - DNA, 25 bp, probe
tacagaggcaaaacctgaatatcca

SEQ ID NO: 288406 - DNA, 25 bp, probe
tacagggtggtcttcgacatcacct

SEQ ID NO: 288407 - DNA, 25 bp, probe
tacaggagcacggcagttacaccac

SEQ ID NO: 288408 - DNA, 25 bp, probe
tacaggatgacagcagccgagacca

SEQ ID NO: 288409 - DNA, 25 bp, probe
tacagcgcaacagcagcctgcagct

SEQ ID NO: 288410 - DNA, 25 bp, probe
tacaggcaactgagccactgaagaa

SEQ ID NO: 288411 - DNA, 25 bp, probe
tacaggaagcgaggatcctgaagca

SEQ ID NO: 288412 - DNA, 25 bp, probe
tacagtcaagccccatcaactagaa

SEQ ID NO: 288413 - DNA, 25 bp, probe
tacattccagccacatatcacaaac

SEQ ID NO: 288414 - DNA, 25 bp, probe
tacttggcattcacagcacatcaaa

SEQ ID NO: 288415 - DNA, 25 bp, probe
tactgggatttttatcgagaagtaa

SEQ ID NO: 288416 - DNA, 25 bp, probe
tactgggatttttatcgagaagtaa

SEQ ID NO: 288417 - DNA, 25 bp, probe
tactgggtgttctaacaataagaaa

SEQ ID NO: 288418 - DNA, 25 bp, probe
tacgacgatgtatcaacagagaaac

SEQ ID NO: 288419 - DNA, 25 bp, probe
tacgaacattcgtcatatcaggatg

SEQ ID NO: 288420 - DNA, 25 bp, probe
taccaaatcccctcagcagagtgtg

SEQ ID NO: 288421 - DNA, 25 bp, probe
tactcattcatcatctaacaaaggt

SEQ ID NO: 288422 - DNA, 25 bp, probe
tactgtacacgtctacctaggttca

SEQ ID NO: 288423 - DNA, 25 bp, probe
tactgaaacagtttacttttgttca

SEQ ID NO: 288424 - DNA, 25 bp, probe
tacgaaatatggttccttttgtggc

SEQ ID NO: 288425 - DNA, 25 bp, probe
tactgaggaggggaccttcgagggc

SEQ ID NO: 288426 - DNA, 25 bp, probe
tactgcgatgaggggactttagaag

SEQ ID NO: 288427 - DNA, 25 bp, probe
tacagccaaggctggcttctgggag

SEQ ID NO: 288428 - DNA, 25 bp, probe
tacttcaagagcaagttctcgggag

SEQ ID NO: 288429 - DNA, 25 bp, probe
tactttcaacaaattctgggggaca

SEQ ID NO: 288430 - DNA, 25 bp, probe
tactctgtgaactttatttaaggac

SEQ ID NO: 288431 - DNA, 25 bp, probe
tactcttgggcatattttccatggg

SEQ ID NO: 288432 - DNA, 25 bp, probe
tactatatgtgggtagtattccagc

SEQ ID NO: 288433 - DNA, 25 bp, probe
tacttcattgtcttgaggcttccag

SEQ ID NO: 288434 - DNA, 25 bp, probe
tagaagctttgctgcaggatctgcg

SEQ ID NO: 288435 - DNA, 25 bp, probe
tacattgccttctgcatcagcatct

SEQ ID NO: 288436 - DNA, 25 bp, probe
tacttcgtgacaggcatcgtcagct

SEQ ID NO: 288437 - DNA, 25 bp, probe
tactgtcgagtaagctcagtcccct

SEQ ID NO: 288438 - DNA, 25 bp, probe
tacttctggatctgctatgtcttcg

SEQ ID NO: 288439 - DNA, 25 bp, probe
tactcctggttagtacattctcaga

SEQ ID NO: 288440 - DNA, 25 bp, probe
tacattatcttttgattcatttaat

SEQ ID NO: 288441 - DNA, 25 bp, probe
tacatcctcttcagattgctttata

SEQ ID NO: 288442 - DNA, 25 bp, probe
tactcttctgtcagtggcttatgtc

SEQ ID NO: 288443 - DNA, 25 bp, probe
tactgaatcagaaagtggtcttgct

SEQ ID NO: 288444 - DNA, 25 bp, probe
tacagaatcgaactctgcacttctc

SEQ ID NO: 288445 - DNA, 25 bp, probe
tacagagcatcctagaggacttctt

SEQ ID NO: 288446 - DNA, 25 bp, probe
tacagcgctcgaagaatcactatca

SEQ ID NO: 288447 - DNA, 25 bp, probe
tacatcctgctgagtagcactatgc

SEQ ID NO: 288448 - DNA, 25 bp, probe
ttctgttgataatggttgttctcaa

SEQ ID NO: 288449 - DNA, 25 bp, probe
tacatctctgtgttgatgacagtgt

SEQ ID NO: 288450 - DNA, 25 bp, probe
tacttgctggggtacagttgcttcc

SEQ ID NO: 288451 - DNA, 25 bp, probe
tacgtcttccgatcagtggtgtctg

SEQ ID NO: 288452 - DNA, 25 bp, probe
tacagtgttcctacagcctggattt

SEQ ID NO: 288453 - DNA, 25 bp, probe
tacagatttcatcctggccattttt

SEQ ID NO: 288454 - DNA, 25 bp, probe
tacagctgttgtcctggtatctgca

SEQ ID NO: 288455 - DNA, 25 bp, probe
tagcagctgtaggtggttttgccag

SEQ ID NO: 288456 - DNA, 25 bp, probe
tagccatgtaggcattatcatctcc

SEQ ID NO: 288457 - DNA, 25 bp, probe
tacatcttcaggatgattcatctag

SEQ ID NO: 288458 - DNA, 25 bp, probe
tactcttcaccacgatatcatgtta

SEQ ID NO: 288459 - DNA, 25 bp, probe
tacttctcagcttctgcgatcagat

SEQ ID NO: 288460 - DNA, 25 bp, probe
tactatgccactgctctcaagagca

SEQ ID NO: 288461 - DNA, 25 bp, probe
tacatcgtcacggagtacatgagca

SEQ ID NO: 288462 - DNA, 25 bp, probe
tacagtctcatcggcaggaagctgt

SEQ ID NO: 288463 - DNA, 25 bp, probe
tacacctgcatctgcggcagtggtg

SEQ ID NO: 288464 - DNA, 25 bp, probe
tacctttgcctgctcaggccatgaa

SEQ ID NO: 288465 - DNA, 25 bp, probe
tacccgaactgcatcaggcgtggca

SEQ ID NO: 288466 - DNA, 25 bp, probe
tacaccaaagctgatgggcgtggag

SEQ ID NO: 288467 - DNA, 25 bp, probe
tacagcgtgaacggggagccggtga

SEQ ID NO: 288468 - DNA, 25 bp, probe
tatgctgggaatctagggcctggaa

SEQ ID NO: 288469 - DNA, 25 bp, probe
tactgggacatgttaggcccttgtt

SEQ ID NO: 288470 - DNA, 25 bp, probe
tacgtggagatcctcaggaccctgt

SEQ ID NO: 288471 - DNA, 25 bp, probe
tacgtgaggatcctgcagcgcatga

SEQ ID NO: 288472 - DNA, 25 bp, probe
tactgtggcatgacctgtgccgagc

SEQ ID NO: 288473 - DNA, 25 bp, probe
tacagctgagcattatgatgttaac

SEQ ID NO: 288474 - DNA, 25 bp, probe
tacagctccagacgcgttaagcgca

SEQ ID NO: 288475 - DNA, 25 bp, probe
tacatgctagactgcgctattcacc

SEQ ID NO: 288476 - DNA, 25 bp, probe
tacatgctagactgcgctattcacc

SEQ ID NO: 288477 - DNA, 25 bp, probe
tacatgtgtacattcttcacctcct

SEQ ID NO: 288478 - DNA, 25 bp, probe
tacagctaatcagcattctcactcc

SEQ ID NO: 288479 - DNA, 25 bp, probe
tacttgcaatattctattcactgaa

SEQ ID NO: 288480 - DNA, 25 bp, probe
tacttcacatcgtcgttcacatggg

SEQ ID NO: 288481 - DNA, 25 bp, probe
tacttcacatcgtcgttcacatggg

SEQ ID NO: 288482 - DNA, 25 bp, probe
tacttcactgctacagagccacagt

SEQ ID NO: 288483 - DNA, 25 bp, probe
tacttcactgctacagagccacagt

SEQ ID NO: 288484 - DNA, 25 bp, probe
tacaccaatgcttcagatgggctgt

SEQ ID NO: 288485 - DNA, 25 bp, probe
tacatgccaggcgacgtgccagtgt

SEQ ID NO: 288486 - DNA, 25 bp, probe
tacattgctgaggacgagaatggga

SEQ ID NO: 288487 - DNA, 25 bp, probe
tacagtgtgaagtctgacatttgga

SEQ ID NO: 288488 - DNA, 25 bp, probe
tacagtctactagtgaattagcgac

SEQ ID NO: 288489 - DNA, 25 bp, probe
tacagtccccaggagatgtggaact

SEQ ID NO: 288490 - DNA, 25 bp, probe
tacttcctacaggagcacggcagtt

SEQ ID NO: 288491 - DNA, 25 bp, probe
tactagcccaaccaacatggcagct

SEQ ID NO: 288492 - DNA, 25 bp, probe
tacttgcctgcattccaaaatgact

SEQ ID NO: 288493 - DNA, 25 bp, probe
tacttgcctgcattccaaaatgact

SEQ ID NO: 288494 - DNA, 25 bp, probe
tacttgagtgtcactcagcaacact

SEQ ID NO: 288495 - DNA, 25 bp, probe
tacttctggtcatgcttacactgat

SEQ ID NO: 288496 - DNA, 25 bp, probe
tactttgtcttgcctgtatgcagcc

SEQ ID NO: 288497 - DNA, 25 bp, probe
tacatcttcctgggttgcacagatc

SEQ ID NO: 288498 - DNA, 25 bp, probe
taccttcagcgcagttgcaatgtaa

SEQ ID NO: 288499 - DNA, 25 bp, probe
taccactcccgggacaggatgcaaa

SEQ ID NO: 288500 - DNA, 25 bp, probe
tacgaccctaaggacgtcatcggca

SEQ ID NO: 288501 - DNA, 25 bp, probe
tacgaccctcaacgtctactgagta

SEQ ID NO: 288502 - DNA, 25 bp, probe
tacttcgacgaacactacgagtacc

SEQ ID NO: 288503 - DNA, 25 bp, probe
tagccccaggaacccttgaggttct

SEQ ID NO: 288504 - DNA, 25 bp, probe
tagccccaggaacccttgaggttct

SEQ ID NO: 288505 - DNA, 25 bp, probe
tagaccctcaaactgggtgggttct

SEQ ID NO: 288506 - DNA, 25 bp, probe
ttgaccccaggactgtactacgact

SEQ ID NO: 288507 - DNA, 25 bp, probe
ttgaccccaggactgtactacgact

SEQ ID NO: 288508 - DNA, 25 bp, probe
tagaccccaggatgaagaacaagct

SEQ ID NO: 288509 - DNA, 25 bp, probe
tagacccctggatatatatcctcct

SEQ ID NO: 288510 - DNA, 25 bp, probe
taccccagctggttttttatacagt

SEQ ID NO: 288511 - DNA, 25 bp, probe
tacttccctgagttttgcttattca

SEQ ID NO: 288512 - DNA, 25 bp, probe
tacagtccagatgttcttcgtaata

SEQ ID NO: 288513 - DNA, 25 bp, probe
tacagtcacaatctacttttcttaa

SEQ ID NO: 288514 - DNA, 25 bp, probe
taccgaaatggtactcttttcatca

SEQ ID NO: 288515 - DNA, 25 bp, probe
tactaaaatatttctcttcctcata

SEQ ID NO: 288516 - DNA, 25 bp, probe
tacatgacctatatcttttcctctt

SEQ ID NO: 288517 - DNA, 25 bp, probe
tacagggatgctgtttttccattct

SEQ ID NO: 288518 - DNA, 25 bp, probe
tacttatcagctatcttattccaaa

SEQ ID NO: 288519 - DNA, 25 bp, probe
tacttatcagctatcttattccaaa

SEQ ID NO: 288520 - DNA, 25 bp, probe
tactgaaagatctctgtcacatcca

SEQ ID NO: 288521 - DNA, 25 bp, probe
tactcagatagtagtgctgtcatca

SEQ ID NO: 288522 - DNA, 25 bp, probe
tactgagctaatagccactagcaga

SEQ ID NO: 288523 - DNA, 25 bp, probe
tacatcacaataatccccatgctga

SEQ ID NO: 288524 - DNA, 25 bp, probe
tacatcccaagtcggccattgaaaa

SEQ ID NO: 288525 - DNA, 25 bp, probe
tacatcgccaagtgcctcaaagacc

SEQ ID NO: 288526 - DNA, 25 bp, probe
tactcggccaaccagtgcaaagccc

SEQ ID NO: 288527 - DNA, 25 bp, probe
tactcgggaatccggcacaaggcac

SEQ ID NO: 288528 - DNA, 25 bp, probe
tactggctgtacatggaagaaggca

SEQ ID NO: 288529 - DNA, 25 bp, probe
tactggctgtacatggaagaaggca

SEQ ID NO: 288530 - DNA, 25 bp, probe
tactgggtaagtcaacacatggaac

SEQ ID NO: 288531 - DNA, 25 bp, probe
tactgggtaagtcaacacatggaac

SEQ ID NO: 288532 - DNA, 25 bp, probe
tacatggcgtatcttcagatccaga

SEQ ID NO: 288533 - DNA, 25 bp, probe
tacatggtgattctcttgtccaggc

SEQ ID NO: 288534 - DNA, 25 bp, probe
tacgtgtgactagtgcttaccatac

SEQ ID NO: 288535 - DNA, 25 bp, probe
tacagtgtgataaggcctactatac

SEQ ID NO: 288536 - DNA, 25 bp, probe
tactgtgtagattgctggctactaa

SEQ ID NO: 288537 - DNA, 25 bp, probe
tactgctgtggttcaggcagcccta

SEQ ID NO: 288538 - DNA, 25 bp, probe
tacagcaggagtgcatgaggcaact

SEQ ID NO: 288539 - DNA, 25 bp, probe
tacgatcggtacatggctatctgcc

SEQ ID NO: 288540 - DNA, 25 bp, probe
tacagcatcgttctttgctgaggcc

SEQ ID NO: 288541 - DNA, 25 bp, probe
tacagcagcctgtgtttgagcagcg

SEQ ID NO: 288542 - DNA, 25 bp, probe
tacaggcctgggtttgactgtgctt

SEQ ID NO: 288543 - DNA, 25 bp, probe
tacaggcctgggtttgactgtgctt

SEQ ID NO: 288544 - DNA, 25 bp, probe
tactacctggtcatggagctgtgcc

SEQ ID NO: 288545 - DNA, 25 bp, probe
tacttccggtattctctgatggacc

SEQ ID NO: 288546 - DNA, 25 bp, probe
tacttacaggtacctctcttaggga

SEQ ID NO: 288547 - DNA, 25 bp, probe
tacttacaggtacctctcttaggga

SEQ ID NO: 288548 - DNA, 25 bp, probe
tacttagcggattcctgccttttga

SEQ ID NO: 288549 - DNA, 25 bp, probe
tacttatggctgtatttgcactcat

SEQ ID NO: 288550 - DNA, 25 bp, probe
tacttatggctgtatttgcactcat

SEQ ID NO: 288551 - DNA, 25 bp, probe
tacttagtgcatttgtgcagatatt

SEQ ID NO: 288552 - DNA, 25 bp, probe
tacttcagtgtactcatcaatttta

SEQ ID NO: 288553 - DNA, 25 bp, probe
tacttcagtgtactcatcaatttta

SEQ ID NO: 288554 - DNA, 25 bp, probe
tactgtctcagtttacattttcggt

SEQ ID NO: 288555 - DNA, 25 bp, probe
tactgtttggaaacattcctcaggt

SEQ ID NO: 288556 - DNA, 25 bp, probe
tacgattatagtaccactgcacatc

SEQ ID NO: 288557 - DNA, 25 bp, probe
tacagaatatggttctcctactaac

SEQ ID NO: 288558 - DNA, 25 bp, probe
tacagcaacgagctgcaggtcccaa

SEQ ID NO: 288559 - DNA, 25 bp, probe
tacagagtctgatgtgtgggcctat

SEQ ID NO: 288560 - DNA, 25 bp, probe
tacagcaagtgatgtgtgggccttt

SEQ ID NO: 288561 - DNA, 25 bp, probe
tacagcaagtgatgtgtgggccttt

SEQ ID NO: 288562 - DNA, 25 bp, probe
taccaactgtttagggccctgattt

SEQ ID NO: 288563 - DNA, 25 bp, probe
taccaccaaattatccaactgttat

SEQ ID NO: 288564 - DNA, 25 bp, probe
tacccaaaatttatcatatgtagaa

SEQ ID NO: 288565 - DNA, 25 bp, probe
tacgcaaagaatctattcatgatgg

SEQ ID NO: 288566 - DNA, 25 bp, probe
tacggacaacatcctttctgtctga

SEQ ID NO: 288567 - DNA, 25 bp, probe
tacagtactagaccatgcattctta

SEQ ID NO: 288568 - DNA, 25 bp, probe
tacagttccaacgtgctgttccatt

SEQ ID NO: 288569 - DNA, 25 bp, probe
tactttcgcaatcacttctgcatca

SEQ ID NO: 288570 - DNA, 25 bp, probe
tactaatccacttcactctgatgac

SEQ ID NO: 288571 - DNA, 25 bp, probe
tactttgccacttctatgcatgaac

SEQ ID NO: 288572 - DNA, 25 bp, probe
tactattccataactccagacatca

SEQ ID NO: 288573 - DNA, 25 bp, probe
tactattccataactccagacatca

SEQ ID NO: 288574 - DNA, 25 bp, probe
tacatatctgccaatgccggagacc

SEQ ID NO: 288575 - DNA, 25 bp, probe
tacatatctgccaatgccggagacc

SEQ ID NO: 288576 - DNA, 25 bp, probe
tacatcacgcttagccaggcatcac

SEQ ID NO: 288577 - DNA, 25 bp, probe
tacatcacgcttagccaggcatcac

SEQ ID NO: 288578 - DNA, 25 bp, probe
tactacagcatctgccaggacactg

SEQ ID NO: 288579 - DNA, 25 bp, probe
tacatccatcacgccattgacttgg

SEQ ID NO: 288580 - DNA, 25 bp, probe
tactccacgtccatcgacatgtggt

SEQ ID NO: 288581 - DNA, 25 bp, probe
tactccacgtccatcgacatgtggt

SEQ ID NO: 288582 - DNA, 25 bp, probe
taccctgcctccaattacagtgact

SEQ ID NO: 288583 - DNA, 25 bp, probe
tacgccacatttctgatccaggact

SEQ ID NO: 288584 - DNA, 25 bp, probe
tactccaagcgactagaccggagtg

SEQ ID NO: 288585 - DNA, 25 bp, probe
tactcacagagctggtcaccaaagg

SEQ ID NO: 288586 - DNA, 25 bp, probe
tactcagcaatctagttgcctgcaa

SEQ ID NO: 288587 - DNA, 25 bp, probe
tacatcgaagcatgtctcagccaga

SEQ ID NO: 288588 - DNA, 25 bp, probe
tacagagtcagaactccagcaccat

SEQ ID NO: 288589 - DNA, 25 bp, probe
tacatacatcataagctccagcctt

SEQ ID NO: 288590 - DNA, 25 bp, probe
tacatttgcataatctccaccatct

SEQ ID NO: 288591 - DNA, 25 bp, probe
tagcatttgcatttcagtactgact

SEQ ID NO: 288592 - DNA, 25 bp, probe
tagcatttgcatttcagtactgact

SEQ ID NO: 288593 - DNA, 25 bp, probe
tacatatgatgatttccatactatt

SEQ ID NO: 288594 - DNA, 25 bp, probe
tactcttgtgttacatcatctcatt

SEQ ID NO: 288595 - DNA, 25 bp, probe
tactcttgtgttacatcatctcatt

SEQ ID NO: 288596 - DNA, 25 bp, probe
tacttctttatcaagcatccatctg

SEQ ID NO: 288597 - DNA, 25 bp, probe
tactttgtattgtactgccattcct

SEQ ID NO: 288598 - DNA, 25 bp, probe
tactgactgtgaggtagctgccact

SEQ ID NO: 288599 - DNA, 25 bp, probe
tacttgcggacgggtccgctggggc

SEQ ID NO: 288600 - DNA, 25 bp, probe
tacccgcgacctggtcaagatcggg

SEQ ID NO: 288601 - DNA, 25 bp, probe
tacccctaccagggcaaggatggtt

SEQ ID NO: 288602 - DNA, 25 bp, probe
tacctccctgtaggaagagtgggtt

SEQ ID NO: 288603 - DNA, 25 bp, probe
tacccctcatggaaagacagctgga

SEQ ID NO: 288604 - DNA, 25 bp, probe
tacaggttcgtgaaggacaggcgcc

SEQ ID NO: 288605 - DNA, 25 bp, probe
tacgcgtacacacaggacttggtct

SEQ ID NO: 288606 - DNA, 25 bp, probe
tacgaccatcaacagagactgactg

SEQ ID NO: 288607 - DNA, 25 bp, probe
tacatcccatccacaatactactga

SEQ ID NO: 288608 - DNA, 25 bp, probe
tactcctcaactccaaaatagatca

SEQ ID NO: 288609 - DNA, 25 bp, probe
tacatcttcaactaaaatcccatac

SEQ ID NO: 288610 - DNA, 25 bp, probe
tactgttcgacatagtgacggaagc

SEQ ID NO: 288611 - DNA, 25 bp, probe
tacattctcgactttggggattagt

SEQ ID NO: 288612 - DNA, 25 bp, probe
tacattctcaaacaagaggacttgg

SEQ ID NO: 288613 - DNA, 25 bp, probe
tacttccacaagcccagggagtcac

SEQ ID NO: 288614 - DNA, 25 bp, probe
tacttccagaagtgcggggtagggg

SEQ ID NO: 288615 - DNA, 25 bp, probe
tatttccgcaaattccggcggagga

SEQ ID NO: 288616 - DNA, 25 bp, probe
tattgtgcctgaaatttcccgagag

SEQ ID NO: 288617 - DNA, 25 bp, probe
tatttgcttatatctgaagggaggt

SEQ ID NO: 288618 - DNA, 25 bp, probe
tacttatcttatgccacgggaagtt

SEQ ID NO: 288619 - DNA, 25 bp, probe
tacttacatctaaagagctagggag

SEQ ID NO: 288620 - DNA, 25 bp, probe
tactgtgaatttaggcatctctggc

SEQ ID NO: 288621 - DNA, 25 bp, probe
tacatgtcacatttagctgtgctca

SEQ ID NO: 288622 - DNA, 25 bp, probe
tacaggatcatgtaaatgctcaaag

SEQ ID NO: 288623 - DNA, 25 bp, probe
tacggttgcaaactgctgaccacgc

SEQ ID NO: 288624 - DNA, 25 bp, probe
tactgatgttcatacaaaccagcag

SEQ ID NO: 288625 - DNA, 25 bp, probe
tactatgtgctacagctgacccagt

SEQ ID NO: 288626 - DNA, 25 bp, probe
tacattgtccataaggaattcgatg

SEQ ID NO: 288627 - DNA, 25 bp, probe
tacatttcctaaaggtttgagaatt

SEQ ID NO: 288628 - DNA, 25 bp, probe
tacctaccaaaagggattgaggatc

SEQ ID NO: 288629 - DNA, 25 bp, probe
tacctacctacctggttgatcctgc

SEQ ID NO: 288630 - DNA, 25 bp, probe
tacccggtagactgaatatctgacg

SEQ ID NO: 288631 - DNA, 25 bp, probe
taccctgagtatcctccaaactgtg

SEQ ID NO: 288632 - DNA, 25 bp, probe
tacatcctgtttctccagaatgaga

SEQ ID NO: 288633 - DNA, 25 bp, probe
tagctcccatttacccaaaataact

SEQ ID NO: 288634 - DNA, 25 bp, probe
tactccctgaagagcgcaatataaa

SEQ ID NO: 288635 - DNA, 25 bp, probe
tactccctgaagagcgcaatataaa

SEQ ID NO: 288636 - DNA, 25 bp, probe
tactctgacataaacccatctgtaa

SEQ ID NO: 288637 - DNA, 25 bp, probe
tactctgacataaacccatctgtaa

SEQ ID NO: 288638 - DNA, 25 bp, probe
tactctgaccacaagaccatttaaa

SEQ ID NO: 288639 - DNA, 25 bp, probe
tactgagacctccagatgcactttc

SEQ ID NO: 288640 - DNA, 25 bp, probe
tacatagccccggagatcattgcct

SEQ ID NO: 288641 - DNA, 25 bp, probe
tacatgagcccagaggtcatcctgt

SEQ ID NO: 288642 - DNA, 25 bp, probe
tactaccaactactatcaccatgac

SEQ ID NO: 288643 - DNA, 25 bp, probe
tacattccaactcgtatagcatgca

SEQ ID NO: 288644 - DNA, 25 bp, probe
tacattccaactcgtatagcatgca

SEQ ID NO: 288645 - DNA, 25 bp, probe
tagcatccaccaattttcactgcat

SEQ ID NO: 288646 - DNA, 25 bp, probe
tactccaccatgcggacaatcattt

SEQ ID NO: 288647 - DNA, 25 bp, probe
tacttacactgactggatccagaat

SEQ ID NO: 288648 - DNA, 25 bp, probe
tacttacactgactggatccagaat

SEQ ID NO: 288649 - DNA, 25 bp, probe
tacttatgttgaatggcttagctat

SEQ ID NO: 288650 - DNA, 25 bp, probe
tactgttggtgccttcttggtattg

SEQ ID NO: 288651 - DNA, 25 bp, probe
tactttgctttttctaggtatctga

SEQ ID NO: 288652 - DNA, 25 bp, probe
tactttttcttacttgttactgtag

SEQ ID NO: 288653 - DNA, 25 bp, probe
tacgttcattctatttgttattgct

SEQ ID NO: 288654 - DNA, 25 bp, probe
tacgttcattctatttgttattgct

SEQ ID NO: 288655 - DNA, 25 bp, probe
tactggagcttcattttggtaagag

SEQ ID NO: 288656 - DNA, 25 bp, probe
tactgggcatgtgctttggggaccg

SEQ ID NO: 288657 - DNA, 25 bp, probe
tactggggctccactgtgaagaaca

SEQ ID NO: 288658 - DNA, 25 bp, probe
tactggggcccaacactgtacccag

SEQ ID NO: 288659 - DNA, 25 bp, probe
tactggggcccaacactgtacccag

SEQ ID NO: 288660 - DNA, 25 bp, probe
tacatggggaccaacatgcattcac

SEQ ID NO: 288661 - DNA, 25 bp, probe
tacaggagcgagagcgagctctcaa

SEQ ID NO: 288662 - DNA, 25 bp, probe
tatggtcacagacttctggcctagg

SEQ ID NO: 288663 - DNA, 25 bp, probe
tacgtaatgagttcccctgagggaa

SEQ ID NO: 288664 - DNA, 25 bp, probe
tacttgagcgagcacttcctgaagg

SEQ ID NO: 288665 - DNA, 25 bp, probe
tactgtgtgctgtaactctccaagg

SEQ ID NO: 288666 - DNA, 25 bp, probe
tactctgtgcagtcagacatctgga

SEQ ID NO: 288667 - DNA, 25 bp, probe
tacatcggcatttacgtggatatct

SEQ ID NO: 288668 - DNA, 25 bp, probe
tacatgaagcatggagacctgaata

SEQ ID NO: 288669 - DNA, 25 bp, probe
tacatgccataattgatcctaatca

SEQ ID NO: 288670 - DNA, 25 bp, probe
tacatcaatcaaatgcactgtaagc

SEQ ID NO: 288671 - DNA, 25 bp, probe
tacatcaatcaaatgcactgtaagc

SEQ ID NO: 288672 - DNA, 25 bp, probe
tacatcaagaaccagctgctaggcc

SEQ ID NO: 288673 - DNA, 25 bp, probe
tactcgtggacaagcttcagcgcat

SEQ ID NO: 288674 - DNA, 25 bp, probe
tacgtgtggagcggctgtgcaggcc

SEQ ID NO: 288675 - DNA, 25 bp, probe
tactgctaatgaggacattcgtccg

SEQ ID NO: 288676 - DNA, 25 bp, probe
tactgacattagcactttgtacagt

SEQ ID NO: 288677 - DNA, 25 bp, probe
taccaattacatctttgtccacgtt

SEQ ID NO: 288678 - DNA, 25 bp, probe
tactttgagaatctcctgtccaaga

SEQ ID NO: 288679 - DNA, 25 bp, probe
tacttgcaaaatctgcagcgatgta

SEQ ID NO: 288680 - DNA, 25 bp, probe
tactgctcaaaattcatgaggtgtc

SEQ ID NO: 288681 - DNA, 25 bp, probe
tactgtgtaacattgctgggcttcc

SEQ ID NO: 288682 - DNA, 25 bp, probe
tactggccagatgagggtgcctccc

SEQ ID NO: 288683 - DNA, 25 bp, probe
tactggccagatgagggtgcctccc

SEQ ID NO: 288684 - DNA, 25 bp, probe
tactgccgtctcaagaagtgcttcc

SEQ ID NO: 288685 - DNA, 25 bp, probe
tactggggtaaatgtgtacctaatg

SEQ ID NO: 288686 - DNA, 25 bp, probe
tagcatcgggctaagactttaactc

SEQ ID NO: 288687 - DNA, 25 bp, probe
tacatcggtattaacttggcaacca

SEQ ID NO: 288688 - DNA, 25 bp, probe
tacatctgtgtatttgagttggctt

SEQ ID NO: 288689 - DNA, 25 bp, probe
tacttgctgtattctcagtttctaa

SEQ ID NO: 288690 - DNA, 25 bp, probe
tacttctatcatttcagcttcttca

SEQ ID NO: 288691 - DNA, 25 bp, probe
tacttctatcatttcagcttcttca

SEQ ID NO: 288692 - DNA, 25 bp, probe
tacttctagtgttcacctctgtgat

SEQ ID NO: 288693 - DNA, 25 bp, probe
tacttcatgactgccacgcatttac

SEQ ID NO: 288694 - DNA, 25 bp, probe
tacatttgtctggctcacactggaa

SEQ ID NO: 288695 - DNA, 25 bp, probe
tacatttgtctggctcacactggaa

SEQ ID NO: 288696 - DNA, 25 bp, probe
tacattttctggtactctgtgaaag

SEQ ID NO: 288697 - DNA, 25 bp, probe
tacttgttgcctcacatccgaaagt

SEQ ID NO: 288698 - DNA, 25 bp, probe
tactgtgttcctaactccaaaagtt

SEQ ID NO: 288699 - DNA, 25 bp, probe
tactgtgttcctaactccaaaagtt

SEQ ID NO: 288700 - DNA, 25 bp, probe
tacttgttctctatgcctctaaaat

SEQ ID NO: 288701 - DNA, 25 bp, probe
tacttctcttgcatacttctaaatt

SEQ ID NO: 288702 - DNA, 25 bp, probe
tacattgtttccacttcttgatatg

SEQ ID NO: 288703 - DNA, 25 bp, probe
tacatcttgttcaatcctcacttta

SEQ ID NO: 288704 - DNA, 25 bp, probe
tacatgttcttcaataaatctatta

SEQ ID NO: 288705 - DNA, 25 bp, probe
tactgcttccttcataactgttcac

SEQ ID NO: 288706 - DNA, 25 bp, probe
tacttgtccctctaagtcatttagc

SEQ ID NO: 288707 - DNA, 25 bp, probe
tactgtgtctgctcataagtacttg

SEQ ID NO: 288708 - DNA, 25 bp, probe
tactgtgtagcttcttatgtccttg

SEQ ID NO: 288709 - DNA, 25 bp, probe
tacattgatagcatttattgtgata

SEQ ID NO: 288710 - DNA, 25 bp, probe
tacattaacattccttttatataaa

SEQ ID NO: 288711 - DNA, 25 bp, probe
tacatttcacatacctatatttatc

SEQ ID NO: 288712 - DNA, 25 bp, probe
tacatttgcactggcttcttgttta

SEQ ID NO: 288713 - DNA, 25 bp, probe
tacatgttcatctgctgtcttgtga

SEQ ID NO: 288714 - DNA, 25 bp, probe
tacatcctcatcgacatggtcctga

SEQ ID NO: 288715 - DNA, 25 bp, probe
tacatcgtgatggaagcggccgcca

SEQ ID NO: 288716 - DNA, 25 bp, probe
tacatcgtgatggaagcggccgcca

SEQ ID NO: 288717 - DNA, 25 bp, probe
tactctgtggagcacgatgtgccca

SEQ ID NO: 288718 - DNA, 25 bp, probe
tactcggtggctctgatggcctaga

SEQ ID NO: 288719 - DNA, 25 bp, probe
tactggggcagtcggtgggctgaga

SEQ ID NO: 288720 - DNA, 25 bp, probe
tactgggccagtctgtgctggggtt

SEQ ID NO: 288721 - DNA, 25 bp, probe
tacttcagccgactctgggaggatt

SEQ ID NO: 288722 - DNA, 25 bp, probe
tacttactgcaatgctcgctggaga

SEQ ID NO: 288723 - DNA, 25 bp, probe
tactgaagagctgcctcctggaagc

SEQ ID NO: 288724 - DNA, 25 bp, probe
tacgaggacttcctcatctggcagg

SEQ ID NO: 288725 - DNA, 25 bp, probe
tactgaggatttcctcagctgggag

SEQ ID NO: 288726 - DNA, 25 bp, probe
tacgaggacgtggcgggtggagctc

SEQ ID NO: 288727 - DNA, 25 bp, probe
tacgggtggtgccagtttagagctc

SEQ ID NO: 288728 - DNA, 25 bp, probe
tacggtctggacaactttgacacac

SEQ ID NO: 288729 - DNA, 25 bp, probe
tacgtgtggggaacaagtaccgcct

SEQ ID NO: 288730 - DNA, 25 bp, probe
tacggtggatggcaccggagtccct

SEQ ID NO: 288731 - DNA, 25 bp, probe
taccgtggaatgtccctggagtact

SEQ ID NO: 288732 - DNA, 25 bp, probe
tacggtgacatgtaccctgtgacaa

SEQ ID NO: 288733 - DNA, 25 bp, probe
tacgtgggtgtactccatcaacaac

SEQ ID NO: 288734 - DNA, 25 bp, probe
tactgcgtggtgtatgataacaaca

SEQ ID NO: 288735 - DNA, 25 bp, probe
tactgctcatgctgacttaaaacac

SEQ ID NO: 288736 - DNA, 25 bp, probe
taccaagtaactaaagcaacgtgct

SEQ ID NO: 288737 - DNA, 25 bp, probe
tttgaagtcgaaaaatacattgtcc

SEQ ID NO: 288738 - DNA, 25 bp, probe
tttcaaatgacctgattaatttcct

SEQ ID NO: 288739 - DNA, 25 bp, probe
ttccaccacacctggctaatttttt

SEQ ID NO: 288740 - DNA, 25 bp, probe
tacgccaaacctcggcattttttgt

SEQ ID NO: 288741 - DNA, 25 bp, probe
tacccaggcagatgggagggttgtg

SEQ ID NO: 288742 - DNA, 25 bp, probe
tagttggactgacgggcagggccgg

SEQ ID NO: 288743 - DNA, 25 bp, probe
tacttggggaaatcaggtgcagcgg

SEQ ID NO: 288744 - DNA, 25 bp, probe
taccggggaaattcaacgtccactg

SEQ ID NO: 288745 - DNA, 25 bp, probe
taccggggaaattcaacgtccactg

SEQ ID NO: 288746 - DNA, 25 bp, probe
taccgggataaaattactattgcta

SEQ ID NO: 288747 - DNA, 25 bp, probe
tacggctggtctttttactttggag

SEQ ID NO: 288748 - DNA, 25 bp, probe
tattggggcctttcttacatgggga

SEQ ID NO: 288749 - DNA, 25 bp, probe
tattgcgggtttgcctacaggtaga

SEQ ID NO: 288750 - DNA, 25 bp, probe
tactggggcttttcctattgatttg

SEQ ID NO: 288751 - DNA, 25 bp, probe
taccaggggtttggccattgcttgg

SEQ ID NO: 288752 - DNA, 25 bp, probe
tactcagggtggaagtcctgcctat

SEQ ID NO: 288753 - DNA, 25 bp, probe
taccactggcatcgtgatggactcc

SEQ ID NO: 288754 - DNA, 25 bp, probe
taccactggcatcgtgatggactcc

SEQ ID NO: 288755 - DNA, 25 bp, probe
tactcatcagtcctgattagcctcc

SEQ ID NO: 288756 - DNA, 25 bp, probe
tacatcaatgcttttgttcctctca

SEQ ID NO: 288757 - DNA, 25 bp, probe
tacatagagctttctgttgctgtct

SEQ ID NO: 288758 - DNA, 25 bp, probe
tacatcagatgtttctttgcagtgg

SEQ ID NO: 288759 - DNA, 25 bp, probe
tactgctacatcttcatcttcaggg

SEQ ID NO: 288760 - DNA, 25 bp, probe
tactgtggcagctttgcttacgctt

SEQ ID NO: 288761 - DNA, 25 bp, probe
tactgtgaacgtcgtgtgactcagt

SEQ ID NO: 288762 - DNA, 25 bp, probe
tacgtacgcgtgcatgcgacgtcat

SEQ ID NO: 288763 - DNA, 25 bp, probe
tacgaagctgggttggtcgctcgtt

SEQ ID NO: 288764 - DNA, 25 bp, probe
tactactggggcttttcctattgat

SEQ ID NO: 288765 - DNA, 25 bp, probe
tactaactctgggattttcatttta

SEQ ID NO: 288766 - DNA, 25 bp, probe
tacgccttcttgaataagtctttta

SEQ ID NO: 288767 - DNA, 25 bp, probe
tatcgagttccggaaagccttcctc

SEQ ID NO: 288768 - DNA, 25 bp, probe
tacgacgctcgtgaaagcacatacc

SEQ ID NO: 288769 - DNA, 25 bp, probe
tacgacgctcgtgaaagcacatacc

SEQ ID NO: 288770 - DNA, 25 bp, probe
tacgaggcgctggccaagcaagtag

SEQ ID NO: 288771 - DNA, 25 bp, probe
tactgggacccatgaatctgataga

SEQ ID NO: 288772 - DNA, 25 bp, probe
tacttaatcccatgtcatgcgaccc

SEQ ID NO: 288773 - DNA, 25 bp, probe
tactcatcaatgcccacgagcagca

SEQ ID NO: 288774 - DNA, 25 bp, probe
tactatcactgcacctgaagaaaaa

SEQ ID NO: 288775 - DNA, 25 bp, probe
tactatcactgcacctgaagaaaaa

SEQ ID NO: 288776 - DNA, 25 bp, probe
tacttctctgcaacttgttgagcaa

SEQ ID NO: 288777 - DNA, 25 bp, probe
tacttccatcagatatatgtggctt

SEQ ID NO: 288778 - DNA, 25 bp, probe
tacgatccacgaaagaggccatgtc

SEQ ID NO: 288779 - DNA, 25 bp, probe
tactataccagtaagtgccacttct

SEQ ID NO: 288780 - DNA, 25 bp, probe
tacttacaaagaggtgctcagcttc

SEQ ID NO: 288781 - DNA, 25 bp, probe
tactggacgacaacggccacattat

SEQ ID NO: 288782 - DNA, 25 bp, probe
tactggaccacgaaggccactgtaa

SEQ ID NO: 288783 - DNA, 25 bp, probe
tttggcctactgcaggcccatggga

SEQ ID NO: 288784 - DNA, 25 bp, probe
tactggcctatgcctgaggcctctt

SEQ ID NO: 288785 - DNA, 25 bp, probe
tactggcctatgcctgaggcctctt

SEQ ID NO: 288786 - DNA, 25 bp, probe
tactgtggattggtgggtttcgggg

SEQ ID NO: 288787 - DNA, 25 bp, probe
tactgtacatattggggagtggggg

SEQ ID NO: 288788 - DNA, 25 bp, probe
tacgcaccattttgtcaggtgggag

SEQ ID NO: 288789 - DNA, 25 bp, probe
tacgcaccattttgtcaggtgggag

SEQ ID NO: 288790 - DNA, 25 bp, probe
taccaactgctttgctctagggaag

SEQ ID NO: 288791 - DNA, 25 bp, probe
tactcagaatttttccacgagaagg

SEQ ID NO: 288792 - DNA, 25 bp, probe
tactcttttgtaagccatctgagaa

SEQ ID NO: 288793 - DNA, 25 bp, probe
tactcttttgtaagccatctgagaa

SEQ ID NO: 288794 - DNA, 25 bp, probe
taccagattaaaaccactgcaaata

SEQ ID NO: 288795 - DNA, 25 bp, probe
taccagattaaaaccactgcaaata

SEQ ID NO: 288796 - DNA, 25 bp, probe
taccagttggaatcacattctttac

SEQ ID NO: 288797 - DNA, 25 bp, probe
taccagttggaatcacattctttac

SEQ ID NO: 288798 - DNA, 25 bp, probe
taccagaagcgagaacatattaaac

SEQ ID NO: 288799 - DNA, 25 bp, probe
taccaaagctattgaactactaacg

SEQ ID NO: 288800 - DNA, 25 bp, probe
tagcccaagtgataacttcgaagcc

SEQ ID NO: 288801 - DNA, 25 bp, probe
tacccaggtagatatctccgaagga

SEQ ID NO: 288802 - DNA, 25 bp, probe
tacccaggtagatatctccgaagga

SEQ ID NO: 288803 - DNA, 25 bp, probe
tacgccgtgaaatgtccacttttgc

SEQ ID NO: 288804 - DNA, 25 bp, probe
taccctggacaagatgccgtgtgtt

SEQ ID NO: 288805 - DNA, 25 bp, probe
tacctgttaaagaatcatctggatt

SEQ ID NO: 288806 - DNA, 25 bp, probe
tacgctggcatcgaaaacactgaga

SEQ ID NO: 288807 - DNA, 25 bp, probe
tactgctggcagtggaactaagaaa

SEQ ID NO: 288808 - DNA, 25 bp, probe
tagcagctggactgattttgaataa

SEQ ID NO: 288809 - DNA, 25 bp, probe
tagactgtgcagtgacctccacata

SEQ ID NO: 288810 - DNA, 25 bp, probe
taccgagattccaactccacagagt

SEQ ID NO: 288811 - DNA, 25 bp, probe
tacccagattccaaggacctcacga

SEQ ID NO: 288812 - DNA, 25 bp, probe
tacccagattccaaggacctcacga

SEQ ID NO: 288813 - DNA, 25 bp, probe
tacccagtcatcatgggccacatat

SEQ ID NO: 288814 - DNA, 25 bp, probe
tacggcagctgaagtggacgcctca

SEQ ID NO: 288815 - DNA, 25 bp, probe
tacggcagctgaagtggacgcctca

SEQ ID NO: 288816 - DNA, 25 bp, probe
taccgacatgatcagaaaggctcat

SEQ ID NO: 288817 - DNA, 25 bp, probe
taccatgacaagccttacaaccata

SEQ ID NO: 288818 - DNA, 25 bp, probe
tacggccaggagatacaaccagcac

SEQ ID NO: 288819 - DNA, 25 bp, probe
tacggcatccggaagaaaccaccaa

SEQ ID NO: 288820 - DNA, 25 bp, probe
tacccttcgtggaaaaccagcctga

SEQ ID NO: 288821 - DNA, 25 bp, probe
tagaccttcaaggacagagacccca

SEQ ID NO: 288822 - DNA, 25 bp, probe
taccctctaggaggcacatacaccc

SEQ ID NO: 288823 - DNA, 25 bp, probe
tactttatataaggcattccacacc

SEQ ID NO: 288824 - DNA, 25 bp, probe
tactttatctacggatttagaatgt

SEQ ID NO: 288825 - DNA, 25 bp, probe
tacttttctccctagttagacacac

SEQ ID NO: 288826 - DNA, 25 bp, probe
tacttttctctggctggaatagtaa

SEQ ID NO: 288827 - DNA, 25 bp, probe
tactatttcaatacttacatatctg

SEQ ID NO: 288828 - DNA, 25 bp, probe
tactatttcaatacttacatatctg

SEQ ID NO: 288829 - DNA, 25 bp, probe
tactatcaaactagctgtcactttt

SEQ ID NO: 288830 - DNA, 25 bp, probe
tacttggaactaggctcttatgtgt

SEQ ID NO: 288831 - DNA, 25 bp, probe
tactgatgtgactcggttttgtcgc

SEQ ID NO: 288832 - DNA, 25 bp, probe
tactatgtacactgaggtctgttct

SEQ ID NO: 288833 - DNA, 25 bp, probe
tactaatgaccaggaggctgatttc

SEQ ID NO: 288834 - DNA, 25 bp, probe
tactaatgaccaggaggctgatttc

SEQ ID NO: 288835 - DNA, 25 bp, probe
tactaatgaaattggctggtttcct

SEQ ID NO: 288836 - DNA, 25 bp, probe
tactaatgattttgcagctctgttt

SEQ ID NO: 288837 - DNA, 25 bp, probe
tactcttgacttagacctatactga

SEQ ID NO: 288838 - DNA, 25 bp, probe
tacctcagaatgacgaccattacgt

SEQ ID NO: 288839 - DNA, 25 bp, probe
tacccaggtacgctgcaaagccttt

SEQ ID NO: 288840 - DNA, 25 bp, probe
tactggcgagtgtttgtgaaagcct

SEQ ID NO: 288841 - DNA, 25 bp, probe
tactgcactgagatctttgactacc

SEQ ID NO: 288842 - DNA, 25 bp, probe
taccaatgctgcagtcctgcagtca

SEQ ID NO: 288843 - DNA, 25 bp, probe
tactgacatgtggggccaggtcacc

SEQ ID NO: 288844 - DNA, 25 bp, probe
tactgacatgtggggccaggtcacc

SEQ ID NO: 288845 - DNA, 25 bp, probe
tactgatggagtggggcgcggaccc

SEQ ID NO: 288846 - DNA, 25 bp, probe
tactgacgagccgaggcagcagtgc

SEQ ID NO: 288847 - DNA, 25 bp, probe
tactgaagccaggcaccgtggctca

SEQ ID NO: 288848 - DNA, 25 bp, probe
tactatcaactgtcatcggcaggtc

SEQ ID NO: 288849 - DNA, 25 bp, probe
tacttggactattcagggagctgca

SEQ ID NO: 288850 - DNA, 25 bp, probe
taccatgtgccaaacgggaggcccc

SEQ ID NO: 288851 - DNA, 25 bp, probe
taccatgtgccaaacgggaggcccc

SEQ ID NO: 288852 - DNA, 25 bp, probe
tacgagctgcctgacggccaggtca

SEQ ID NO: 288853 - DNA, 25 bp, probe
taccaagccggagcacgaggatcag

SEQ ID NO: 288854 - DNA, 25 bp, probe
taccggtcgatgcaacgagtgatga

SEQ ID NO: 288855 - DNA, 25 bp, probe
taccgattggatggtttagtgaggc

SEQ ID NO: 288856 - DNA, 25 bp, probe
taccgagtatcaggatttagtgacc

SEQ ID NO: 288857 - DNA, 25 bp, probe
tacctgagacctagttccagctact

SEQ ID NO: 288858 - DNA, 25 bp, probe
tactctgtaccaatcttactcgagc

SEQ ID NO: 288859 - DNA, 25 bp, probe
taccctcaccagacaaactctgtgc

SEQ ID NO: 288860 - DNA, 25 bp, probe
tacctccccagagtcaaccttgggt

SEQ ID NO: 288861 - DNA, 25 bp, probe
tacctccccagagtcaaccttgggt

SEQ ID NO: 288862 - DNA, 25 bp, probe
taccccgaactggaagccgggagtg

SEQ ID NO: 288863 - DNA, 25 bp, probe
tagacccgagattggagtccggccg

SEQ ID NO: 288864 - DNA, 25 bp, probe
tactctgggagattgtgaccctggc

SEQ ID NO: 288865 - DNA, 25 bp, probe
tacgtggagagttgaactactccag

SEQ ID NO: 288866 - DNA, 25 bp, probe
tacgtggagagttgaactactccag

SEQ ID NO: 288867 - DNA, 25 bp, probe
tacgtggaaggtacgctcactgggg

SEQ ID NO: 288868 - DNA, 25 bp, probe
tacgtagagagggtggccacaaggg

SEQ ID NO: 288869 - DNA, 25 bp, probe
tactttgagggcgagttcacagggc

SEQ ID NO: 288870 - DNA, 25 bp, probe
tacttcatcctgggcagcttccagg

SEQ ID NO: 288871 - DNA, 25 bp, probe
tactcagatactcgtggctttgcgg

SEQ ID NO: 288872 - DNA, 25 bp, probe
taccgctcactgctggaggacgatg

SEQ ID NO: 288873 - DNA, 25 bp, probe
tactcctacaacgtgcaggacaagc

SEQ ID NO: 288874 - DNA, 25 bp, probe
tactcagtcaagacccctgcaaagg

SEQ ID NO: 288875 - DNA, 25 bp, probe
tactcagtcaagacccctgcaaagg

SEQ ID NO: 288876 - DNA, 25 bp, probe
tagttgccaagatgccccaaggaat

SEQ ID NO: 288877 - DNA, 25 bp, probe
taccagcttggatgcccacaaggga

SEQ ID NO: 288878 - DNA, 25 bp, probe
tacctatgaggtaagcgcagaaggg

SEQ ID NO: 288879 - DNA, 25 bp, probe
tacccgcaggttttcagatctagga

SEQ ID NO: 288880 - DNA, 25 bp, probe
tacccgcaggttttcagatctagga

SEQ ID NO: 288881 - DNA, 25 bp, probe
tacccctggtttgcaggtaacatgg

SEQ ID NO: 288882 - DNA, 25 bp, probe
tacccgttgtgttgggtgtcaaaag

SEQ ID NO: 288883 - DNA, 25 bp, probe
tacggaagcctctgggtgacaaaag

SEQ ID NO: 288884 - DNA, 25 bp, probe
tactggaagaattgtggccataaag

SEQ ID NO: 288885 - DNA, 25 bp, probe
taccgaagattagtggagctctaag

SEQ ID NO: 288886 - DNA, 25 bp, probe
ttgcccagtcgttctggaccaaagg

SEQ ID NO: 288887 - DNA, 25 bp, probe
taccacagccctgtggaccacgagg

SEQ ID NO: 288888 - DNA, 25 bp, probe
tacgcccgcactatggtggacaagc

SEQ ID NO: 288889 - DNA, 25 bp, probe
tacctgccggctatgtcggaagacg

SEQ ID NO: 288890 - DNA, 25 bp, probe
tacctgactggcagggcggcactac

SEQ ID NO: 288891 - DNA, 25 bp, probe
taccattgggttcggggactacgtg

SEQ ID NO: 288892 - DNA, 25 bp, probe
taccattgggttcggggactacgtg

SEQ ID NO: 288893 - DNA, 25 bp, probe
tagccatgcgaggtcttggggagct

SEQ ID NO: 288894 - DNA, 25 bp, probe
tacgagcagatctttgggatggatg

SEQ ID NO: 288895 - DNA, 25 bp, probe
tacgagctcaacctgggtcagatca

SEQ ID NO: 288896 - DNA, 25 bp, probe
tacgatgtcatgctggggtgctggc

SEQ ID NO: 288897 - DNA, 25 bp, probe
tacgatgtcatgctggggtgctggc

SEQ ID NO: 288898 - DNA, 25 bp, probe
tacgatgtcatgctggggtgctggc

SEQ ID NO: 288899 - DNA, 25 bp, probe
tactggcccgaggtgggcatgcagc

SEQ ID NO: 288900 - DNA, 25 bp, probe
tacgtcagtcgtgtgcagctctgag

SEQ ID NO: 288901 - DNA, 25 bp, probe
tacgtcagtcgtgtgcagctctgag

SEQ ID NO: 288902 - DNA, 25 bp, probe
tacgccatggttttgtttaggataa

SEQ ID NO: 288903 - DNA, 25 bp, probe
tatggttggttactctttacggtca

SEQ ID NO: 288904 - DNA, 25 bp, probe
tatggttggttactctttacggtca

SEQ ID NO: 288905 - DNA, 25 bp, probe
tttgatcggctttttgcctacggca

SEQ ID NO: 288906 - DNA, 25 bp, probe
tttgatcggctttttgcctacggca

SEQ ID NO: 288907 - DNA, 25 bp, probe
tttgctcggcttttgactggaccga

SEQ ID NO: 288908 - DNA, 25 bp, probe
tacgtgcgcctttctgccggacgcg

SEQ ID NO: 288909 - DNA, 25 bp, probe
tacggcttttttgctggtcagcagt

SEQ ID NO: 288910 - DNA, 25 bp, probe
tactgctgcttagtttttggactga

SEQ ID NO: 288911 - DNA, 25 bp, probe
tactctcagtgtgttctggtcatct

SEQ ID NO: 288912 - DNA, 25 bp, probe
tactacggtgctgctatgttcatgt

SEQ ID NO: 288913 - DNA, 25 bp, probe
tactacaagagaggcgatttcattc

SEQ ID NO: 288914 - DNA, 25 bp, probe
tactacgtcaggcagaattcttcaa

SEQ ID NO: 288915 - DNA, 25 bp, probe
tactgaggccagctggtattagtaa

SEQ ID NO: 288916 - DNA, 25 bp, probe
tacggaacaaggatatgaaggcagc

SEQ ID NO: 288917 - DNA, 25 bp, probe
tacggaacaaggatatgaaggcagc

SEQ ID NO: 288918 - DNA, 25 bp, probe
tactgtccaccagtttatacagaac

SEQ ID NO: 288919 - DNA, 25 bp, probe
tactgtccaccagtttatacagaac

SEQ ID NO: 288920 - DNA, 25 bp, probe
tacttccgccagatgtgctgcaaaa

SEQ ID NO: 288921 - DNA, 25 bp, probe
tagataacccacagttcaatgaact

SEQ ID NO: 288922 - DNA, 25 bp, probe
tagttaccccgacacaaggagctct

SEQ ID NO: 288923 - DNA, 25 bp, probe
tacctaccccagctaactggcagca

SEQ ID NO: 288924 - DNA, 25 bp, probe
taccttacccaaaattctggccttg

SEQ ID NO: 288925 - DNA, 25 bp, probe
tacctgtacctcgaagtctatgggc

SEQ ID NO: 288926 - DNA, 25 bp, probe
tactctgtgatcgattcaatgcccg

SEQ ID NO: 288927 - DNA, 25 bp, probe
tactctgtgattgatcaactctccc

SEQ ID NO: 288928 - DNA, 25 bp, probe
tactctgacattcaagcaagatcac

SEQ ID NO: 288929 - DNA, 25 bp, probe
tactctgacattcaagcaagatcac

SEQ ID NO: 288930 - DNA, 25 bp, probe
tactatatcttcgacagctacatcc

SEQ ID NO: 288931 - DNA, 25 bp, probe
tactcatgtatttccactacacaaa

SEQ ID NO: 288932 - DNA, 25 bp, probe
tactcaccatggagcatctaccaag

SEQ ID NO: 288933 - DNA, 25 bp, probe
tactccctggggaagatgccatatg

SEQ ID NO: 288934 - DNA, 25 bp, probe
tacccttgtgggagctgaattcttc

SEQ ID NO: 288935 - DNA, 25 bp, probe
tacccttgtgggagctgaattcttc

SEQ ID NO: 288936 - DNA, 25 bp, probe
tactcctattgccgccagaagatcc

SEQ ID NO: 288937 - DNA, 25 bp, probe
taccattgatatccgcccaagatca

SEQ ID NO: 288938 - DNA, 25 bp, probe
tacgtttgaccccagcgagatcaaa

SEQ ID NO: 288939 - DNA, 25 bp, probe
tacttttaaccattgatgatacaaa

SEQ ID NO: 288940 - DNA, 25 bp, probe
tacgtgactatccctaataacaaag

SEQ ID NO: 288941 - DNA, 25 bp, probe
tacgtgactatccctaataacaaag

SEQ ID NO: 288942 - DNA, 25 bp, probe
tactgtagtcactaccagtaccaat

SEQ ID NO: 288943 - DNA, 25 bp, probe
tactatgaaccatcctgtactcaga

SEQ ID NO: 288944 - DNA, 25 bp, probe
tactatgaaccatcctgtactcaga

SEQ ID NO: 288945 - DNA, 25 bp, probe
tactttaccatatgttgctccagaa

SEQ ID NO: 288946 - DNA, 25 bp, probe
tacttacctgcatgtgttgtacaat

SEQ ID NO: 288947 - DNA, 25 bp, probe
tactaaccagtcttttgaatcactt

SEQ ID NO: 288948 - DNA, 25 bp, probe
tactaaccgtgccatcttgcaaact

SEQ ID NO: 288949 - DNA, 25 bp, probe
tactaaacttcacctacattatctc

SEQ ID NO: 288950 - DNA, 25 bp, probe
tagcaaaacatttactgttttcttt

SEQ ID NO: 288951 - DNA, 25 bp, probe
tagagacccaagtaagattgttttt

SEQ ID NO: 288952 - DNA, 25 bp, probe
tagaaaggacacaagtttgtttcct

SEQ ID NO: 288953 - DNA, 25 bp, probe
tagagaacgacctggttttcctcct

SEQ ID NO: 288954 - DNA, 25 bp, probe
tagagaacgacctggttttcctcct

SEQ ID NO: 288955 - DNA, 25 bp, probe
tagaacaggacctctgcttttgcac

SEQ ID NO: 288956 - DNA, 25 bp, probe
tagaaaaactcgctactttcaaagg

SEQ ID NO: 288957 - DNA, 25 bp, probe
tagaaaaactcgctactttcaaagg

SEQ ID NO: 288958 - DNA, 25 bp, probe
tagaacaagaaccttaccttcaagg

SEQ ID NO: 288959 - DNA, 25 bp, probe
tttacttcaactctaccttagtaga

SEQ ID NO: 288960 - DNA, 25 bp, probe
tttcacttcaagcgctaccgctatc

SEQ ID NO: 288961 - DNA, 25 bp, probe
tttcacttcaagcgctaccgctatc

SEQ ID NO: 288962 - DNA, 25 bp, probe
tttctgcctaagtgctacgtgatcc

SEQ ID NO: 288963 - DNA, 25 bp, probe
tttctgcggaagtcactgggtccct

SEQ ID NO: 288964 - DNA, 25 bp, probe
tttctgcggaagtcactgggtccct

SEQ ID NO: 288965 - DNA, 25 bp, probe
taccgaggggaactgggtgccctgg

SEQ ID NO: 288966 - DNA, 25 bp, probe
tacgcgatgcgggtagtattgttcc

SEQ ID NO: 288967 - DNA, 25 bp, probe
tactcgaggcataaatgtagttgtc

SEQ ID NO: 288968 - DNA, 25 bp, probe
tactcccagcatatagtgtttccat

SEQ ID NO: 288969 - DNA, 25 bp, probe
tacgcccaagcaaggtttgatgcct

SEQ ID NO: 288970 - DNA, 25 bp, probe
tactccatcaacaacgttctcatgt

SEQ ID NO: 288971 - DNA, 25 bp, probe
tactcctaattacattgctcctgaa

SEQ ID NO: 288972 - DNA, 25 bp, probe
tactcctagggcagatagattgtaa

SEQ ID NO: 288973 - DNA, 25 bp, probe
tactcctagggcagatagattgtaa

SEQ ID NO: 288974 - DNA, 25 bp, probe
tactcctttggcatgtgtgcactgg

SEQ ID NO: 288975 - DNA, 25 bp, probe
tacccctacctctgatgagctatgg

SEQ ID NO: 288976 - DNA, 25 bp, probe
tactccgtaccttactgagatctgg

SEQ ID NO: 288977 - DNA, 25 bp, probe
tactccactcccatactaatattgg

SEQ ID NO: 288978 - DNA, 25 bp, probe
tactccactcccatactaatattgg

SEQ ID NO: 288979 - DNA, 25 bp, probe
tactttctccccaacataattattt

SEQ ID NO: 288980 - DNA, 25 bp, probe
tactttgtcccaaaaagatgtataa

SEQ ID NO: 288981 - DNA, 25 bp, probe
tacttttcagcctcaagctttacac

SEQ ID NO: 288982 - DNA, 25 bp, probe
tatttcccaaaaacgtcttgatcac

SEQ ID NO: 288983 - DNA, 25 bp, probe
tataatacttagatcctccttatac

SEQ ID NO: 288984 - DNA, 25 bp, probe
tataacctcttttctcaccaaaaag

SEQ ID NO: 288985 - DNA, 25 bp, probe
taccaccatttgaaccttaacgaag

SEQ ID NO: 288986 - DNA, 25 bp, probe
tacctcgcttggatgcctgtaagga

SEQ ID NO: 288987 - DNA, 25 bp, probe
tacctcgactggatccatgggcaca

SEQ ID NO: 288988 - DNA, 25 bp, probe
tacgcttttcagatcctttcaataa

SEQ ID NO: 288989 - DNA, 25 bp, probe
tacctctaaatcgtccttttatcaa

SEQ ID NO: 288990 - DNA, 25 bp, probe
tacctgaagaccgtcacgtctgcgt

SEQ ID NO: 288991 - DNA, 25 bp, probe
taccatgtgtggtcactacgtctgc

SEQ ID NO: 288992 - DNA, 25 bp, probe
tactcagtatggttcttcagtcgat

SEQ ID NO: 288993 - DNA, 25 bp, probe
tactactagatgtctttaggcagca

SEQ ID NO: 288994 - DNA, 25 bp, probe
tactgtgtctgttctcattgggagc

SEQ ID NO: 288995 - DNA, 25 bp, probe
tactgtgtctgttctcattgggagc

SEQ ID NO: 288996 - DNA, 25 bp, probe
tactgtaccttcaataatggactat

SEQ ID NO: 288997 - DNA, 25 bp, probe
tactggactcttcaaaaactgtttt

SEQ ID NO: 288998 - DNA, 25 bp, probe
tacgggacttcctaaaactctatca

SEQ ID NO: 288999 - DNA, 25 bp, probe
tacgggaattacaaaatcccattct

SEQ ID NO: 289000 - DNA, 25 bp, probe
ttggggttctaaatatacaacttgt

SEQ ID NO: 289001 - DNA, 25 bp, probe
tagtgggtttacatactcaactcct

SEQ ID NO: 289002 - DNA, 25 bp, probe
tagtatcaaattgtttctaaccaaa

SEQ ID NO: 289003 - DNA, 25 bp, probe
tagtgggaacacaatttcgaacaaa

SEQ ID NO: 289004 - DNA, 25 bp, probe
tactggagagttcttccgagaccaa

SEQ ID NO: 289005 - DNA, 25 bp, probe
tacgagatggacctcaatgccgggc

SEQ ID NO: 289006 - DNA, 25 bp, probe
tactcagctgagtcctctaagtggg

SEQ ID NO: 289007 - DNA, 25 bp, probe
tatccgctggatgtcttgggagagt

SEQ ID NO: 289008 - DNA, 25 bp, probe
tagctgccatggtggttaggaatgt

SEQ ID NO: 289009 - DNA, 25 bp, probe
tagcatacacgctggtgggccaatg

SEQ ID NO: 289010 - DNA, 25 bp, probe
tagcatacacgctggtgggccaatg

SEQ ID NO: 289011 - DNA, 25 bp, probe
tagcatagggctcagggcacacgtt

SEQ ID NO: 289012 - DNA, 25 bp, probe
taccagggctgaatgggaacagaaa

SEQ ID NO: 289013 - DNA, 25 bp, probe
taccgagggatcaatctgcaaaaaa

SEQ ID NO: 289014 - DNA, 25 bp, probe
tactctgggcgatatttgcaaataa

SEQ ID NO: 289015 - DNA, 25 bp, probe
tactctgggcgatatttgcaaataa

SEQ ID NO: 289016 - DNA, 25 bp, probe
tactctccctgacatttctaacata

SEQ ID NO: 289017 - DNA, 25 bp, probe
tactatactcatacatttttaatat

SEQ ID NO: 289018 - DNA, 25 bp, probe
tactatgagtcaggctctgtttatt

SEQ ID NO: 289019 - DNA, 25 bp, probe
tactggaatcaggcttggttcattt

SEQ ID NO: 289020 - DNA, 25 bp, probe
tactggttcaccctgtaccagtttt

SEQ ID NO: 289021 - DNA, 25 bp, probe
tactggtttcttacattgccatttt

SEQ ID NO: 289022 - DNA, 25 bp, probe
tactgggttggtgcacagtgatttt

SEQ ID NO: 289023 - DNA, 25 bp, probe
tactggtttgtgctctactggttga

SEQ ID NO: 289024 - DNA, 25 bp, probe
tacggttttgtacactggtggtttg

SEQ ID NO: 289025 - DNA, 25 bp, probe
tacggttttgtacactggtggtttg

SEQ ID NO: 289026 - DNA, 25 bp, probe
tacggttttgtgcaatcattgtcgt

SEQ ID NO: 289027 - DNA, 25 bp, probe
tacgaccttctgcgactatttgagt

SEQ ID NO: 289028 - DNA, 25 bp, probe
tactatccttgctaagttttcatag

SEQ ID NO: 289029 - DNA, 25 bp, probe
taccattttggctgtttggatcctc

SEQ ID NO: 289030 - DNA, 25 bp, probe
taccttgtatggccaaaggggcttt

SEQ ID NO: 289031 - DNA, 25 bp, probe
tagcgactttggtcagaaaggcctg

SEQ ID NO: 289032 - DNA, 25 bp, probe
tacccaaatgtgaaaaaggctctca

SEQ ID NO: 289033 - DNA, 25 bp, probe
tactgcccaaggaaggggagcatga

SEQ ID NO: 289034 - DNA, 25 bp, probe
tactcccaagcctacgggactgtct

SEQ ID NO: 289035 - DNA, 25 bp, probe
tactcccaagcctacgggactgtct

SEQ ID NO: 289036 - DNA, 25 bp, probe
tactcccaagcctacgggactgtct

SEQ ID NO: 289037 - DNA, 25 bp, probe
taccccaatgacttgtgggtggttg

SEQ ID NO: 289038 - DNA, 25 bp, probe
tacccaagatattggcagggatggt

SEQ ID NO: 289039 - DNA, 25 bp, probe
tactccaagaaaccaacgctgagaa

SEQ ID NO: 289040 - DNA, 25 bp, probe
tactccaaaataaatcaaggctgca

SEQ ID NO: 289041 - DNA, 25 bp, probe
tactaaaagaaccaccagatctgct

SEQ ID NO: 289042 - DNA, 25 bp, probe
tagccaatgagaacatccccagact

SEQ ID NO: 289043 - DNA, 25 bp, probe
tactgcagagaaacacggaaactag

SEQ ID NO: 289044 - DNA, 25 bp, probe
tactggagctggaccagcggaccca

SEQ ID NO: 289045 - DNA, 25 bp, probe
tactggagctggaccagcggaccca

SEQ ID NO: 289046 - DNA, 25 bp, probe
tactggcaatgcttccacagcgtaa

SEQ ID NO: 289047 - DNA, 25 bp, probe
tactgcccgcaaagctcgcgctaca

SEQ ID NO: 289048 - DNA, 25 bp, probe
tactgcgacaaaagctgcagcccct

SEQ ID NO: 289049 - DNA, 25 bp, probe
tactgcagacagaactgagcccaac

SEQ ID NO: 289050 - DNA, 25 bp, probe
tactgccacaagttcatccagcaag

SEQ ID NO: 289051 - DNA, 25 bp, probe
tactctccaggattgtccacaaatg

SEQ ID NO: 289052 - DNA, 25 bp, probe
tactcttcagtccagatcatccaag

SEQ ID NO: 289053 - DNA, 25 bp, probe
tactcttcatgggctattccacaaa

SEQ ID NO: 289054 - DNA, 25 bp, probe
tacgtttgtgcagaatctctatgta

SEQ ID NO: 289055 - DNA, 25 bp, probe
tactgttcttcagcaactattgtac

SEQ ID NO: 289056 - DNA, 25 bp, probe
taccaccttcaatatcgagttccgg

SEQ ID NO: 289057 - DNA, 25 bp, probe
tacgcatacttcaacaaggactttc

SEQ ID NO: 289058 - DNA, 25 bp, probe
tacgcaacttggtgaggagcatttc

SEQ ID NO: 289059 - DNA, 25 bp, probe
taccaccttctgctatggaatcttc

SEQ ID NO: 289060 - DNA, 25 bp, probe
tactcaaacactctaaaatctgact

SEQ ID NO: 289061 - DNA, 25 bp, probe
tactaaacagcttccttcagatctg

SEQ ID NO: 289062 - DNA, 25 bp, probe
taccacagtcattagccttcttctg

SEQ ID NO: 289063 - DNA, 25 bp, probe
taccatatgatattccacttctaga

SEQ ID NO: 289064 - DNA, 25 bp, probe
tactctcatatagtcacactttaaa

SEQ ID NO: 289065 - DNA, 25 bp, probe
tactctcataaagcatgtgccaaaa

SEQ ID NO: 289066 - DNA, 25 bp, probe
tacccagagaactttccaaacaagt

SEQ ID NO: 289067 - DNA, 25 bp, probe
tacctaaaacattctcctcggaaat

SEQ ID NO: 289068 - DNA, 25 bp, probe
tactctcaacgagttcccagaggaa

SEQ ID NO: 289069 - DNA, 25 bp, probe
tacctcactagacatccaaaggaga

SEQ ID NO: 289070 - DNA, 25 bp, probe
tacgtcatccagactactcgaaatg

SEQ ID NO: 289071 - DNA, 25 bp, probe
actccacgggcatcatcatgtaccg

SEQ ID NO: 289072 - DNA, 25 bp, probe
tagcaactatcgatcttgccaaagg

SEQ ID NO: 289073 - DNA, 25 bp, probe
tagaacttctctctctgctaaagta

SEQ ID NO: 289074 - DNA, 25 bp, probe
tagagggaactcttggtacctggaa

SEQ ID NO: 289075 - DNA, 25 bp, probe
tagagggatacatcgcctaccgaca

SEQ ID NO: 289076 - DNA, 25 bp, probe
tactgggatgacatctccgactctg

SEQ ID NO: 289077 - DNA, 25 bp, probe
tactccagcagagtcccacagactc

SEQ ID NO: 289078 - DNA, 25 bp, probe
tacggcaggagctgctcaagaccga

SEQ ID NO: 289079 - DNA, 25 bp, probe
tacggctatgagtgtctggacggca

SEQ ID NO: 289080 - DNA, 25 bp, probe
tactggccatatttgcttgagcctg

SEQ ID NO: 289081 - DNA, 25 bp, probe
tactgtgccaactttatgtggggtc

SEQ ID NO: 289082 - DNA, 25 bp, probe
tactgagtccactttattctggggc

SEQ ID NO: 289083 - DNA, 25 bp, probe
tactgacttcactggagtctcagga

SEQ ID NO: 289084 - DNA, 25 bp, probe
tactgaattccataactgtacagaa

SEQ ID NO: 289085 - DNA, 25 bp, probe
tactccattcctaaacttgtgcaaa

SEQ ID NO: 289086 - DNA, 25 bp, probe
tactccctcagtaaagcatttgcac

SEQ ID NO: 289087 - DNA, 25 bp, probe
tactccctcagtaaagcatttgcac

SEQ ID NO: 289088 - DNA, 25 bp, probe
tactcctctgctctaacattgttgc

SEQ ID NO: 289089 - DNA, 25 bp, probe
tactggccatctgatggactggtgt

SEQ ID NO: 289090 - DNA, 25 bp, probe
tactgtgtactgtatagacagtttg

SEQ ID NO: 289091 - DNA, 25 bp, probe
tacgtcttcgttggcagagatttcc

SEQ ID NO: 289092 - DNA, 25 bp, probe
tacgagatgctggttggcgagtccc

SEQ ID NO: 289093 - DNA, 25 bp, probe
tacgaactgcgtgtgatggagacca

SEQ ID NO: 289094 - DNA, 25 bp, probe
taccaacacgtcactgggaccaggt

SEQ ID NO: 289095 - DNA, 25 bp, probe
tactcgtcacgtgtttggatcaaga

SEQ ID NO: 289096 - DNA, 25 bp, probe
tacctccacgactttctgaacagtg

SEQ ID NO: 289097 - DNA, 25 bp, probe
tacctccacgactttctgaacagtg

SEQ ID NO: 289098 - DNA, 25 bp, probe
taccccacatccttcaaggactgct

SEQ ID NO: 289099 - DNA, 25 bp, probe
taccctccaacagtcatatggcctg

SEQ ID NO: 289100 - DNA, 25 bp, probe
taccctccaacagtcatatggcctg

SEQ ID NO: 289101 - DNA, 25 bp, probe
tacgcagcccaggcatgactgtggc

SEQ ID NO: 289102 - DNA, 25 bp, probe
taccaacgccaggacgtggcgcgac

SEQ ID NO: 289103 - DNA, 25 bp, probe
taccgcaacctgaactgtgaggcgg

SEQ ID NO: 289104 - DNA, 25 bp, probe
tacctactggctgactgggatgaag

SEQ ID NO: 289105 - DNA, 25 bp, probe
tagccttgtccagacgaagtgacgt

SEQ ID NO: 289106 - DNA, 25 bp, probe
taccgagggcagtatcagaagtatg

SEQ ID NO: 289107 - DNA, 25 bp, probe
taccgagggcagtatcagaagtatg

SEQ ID NO: 289108 - DNA, 25 bp, probe
tacgctgggcgacaggagagctcag

SEQ ID NO: 289109 - DNA, 25 bp, probe
tacgtgggctaccaggtgatgcggg

SEQ ID NO: 289110 - DNA, 25 bp, probe
tacctggatgtcctgggctaggggg

SEQ ID NO: 289111 - DNA, 25 bp, probe
tacctggaatgctgggaagtgctag

SEQ ID NO: 289112 - DNA, 25 bp, probe
tacctgccaggcacaggcacagtgc

SEQ ID NO: 289113 - DNA, 25 bp, probe
tactgtccacgcgcatgagcagaac

SEQ ID NO: 289114 - DNA, 25 bp, probe
tactgtgatgaccgactcagccaca

SEQ ID NO: 289115 - DNA, 25 bp, probe
tactctgaatgcctactattatcct

SEQ ID NO: 289116 - DNA, 25 bp, probe
tactctgaatgcctactattatcct

SEQ ID NO: 289117 - DNA, 25 bp, probe
tactctcttgccagcattttcacat

SEQ ID NO: 289118 - DNA, 25 bp, probe
tactctgtgtccggatgtttgacag

SEQ ID NO: 289119 - DNA, 25 bp, probe
tactctgtgtccggatgtttgacag

SEQ ID NO: 289120 - DNA, 25 bp, probe
tactgcaatgctcgctggagaattg

SEQ ID NO: 289121 - DNA, 25 bp, probe
tactgcaactgccagaacttggtat

SEQ ID NO: 289122 - DNA, 25 bp, probe
tactccatcatcagcaacctggatg

SEQ ID NO: 289123 - DNA, 25 bp, probe
tactcagcagagagcatcccgtgtg

SEQ ID NO: 289124 - DNA, 25 bp, probe
tactgccggaagggcatcgtgtgca

SEQ ID NO: 289125 - DNA, 25 bp, probe
tagcatgctttgaagagtctcgggc

SEQ ID NO: 289126 - DNA, 25 bp, probe
tagcatttcgaacatctcggccatt

SEQ ID NO: 289127 - DNA, 25 bp, probe
tagaatacggcacagtctggtcctt

SEQ ID NO: 289128 - DNA, 25 bp, probe
taccacaccgaggagtccagtttgt

SEQ ID NO: 289129 - DNA, 25 bp, probe
tacccaccagagacagtacagaatc

SEQ ID NO: 289130 - DNA, 25 bp, probe
tacccagccatgaacatgttgagtg

SEQ ID NO: 289131 - DNA, 25 bp, probe
taccgcaccataatcactgaagtcc

SEQ ID NO: 289132 - DNA, 25 bp, probe
taccagaccacttctcagaaaatgc

SEQ ID NO: 289133 - DNA, 25 bp, probe
taccgctacagcaaccgatattgtg

SEQ ID NO: 289134 - DNA, 25 bp, probe
tacctgctacttggccttattgcca

SEQ ID NO: 289135 - DNA, 25 bp, probe
tacctctacatgtctgcttgagata

SEQ ID NO: 289136 - DNA, 25 bp, probe
tactcctggcagtgcgtcaatcaga

SEQ ID NO: 289137 - DNA, 25 bp, probe
tactcctggcagtgcgtcaatcaga

SEQ ID NO: 289138 - DNA, 25 bp, probe
tactgccggtgaggctgaaacgctg

SEQ ID NO: 289139 - DNA, 25 bp, probe
tactgccggtgaggctgaaacgctg

SEQ ID NO: 289140 - DNA, 25 bp, probe
tagcttgcggccaggacaacctgaa

SEQ ID NO: 289141 - DNA, 25 bp, probe
tagcttgcggccaggacaacctgaa

SEQ ID NO: 289142 - DNA, 25 bp, probe
tatgctttggggggacaggccagaa

SEQ ID NO: 289143 - DNA, 25 bp, probe
tagcttctgctcccaggaaggtagt

SEQ ID NO: 289144 - DNA, 25 bp, probe
tactcttgctcagcggagaggtatt

SEQ ID NO: 289145 - DNA, 25 bp, probe
tacctggctccagacaatttttctg

SEQ ID NO: 289146 - DNA, 25 bp, probe
taccgagctcgaattaattcctctt

SEQ ID NO: 289147 - DNA, 25 bp, probe
taccagcccatgaacaaattcctgc

SEQ ID NO: 289148 - DNA, 25 bp, probe
tactcatccttaaagtttactccac

SEQ ID NO: 289149 - DNA, 25 bp, probe
tactcatccttaaagtttactccac

SEQ ID NO: 289150 - DNA, 25 bp, probe
tactgacacgtaaggtttcccaatc

SEQ ID NO: 289151 - DNA, 25 bp, probe
tacgtcttgtaatctttcacacttt

SEQ ID NO: 289152 - DNA, 25 bp, probe
tactctgtttacacattttgcactt

SEQ ID NO: 289153 - DNA, 25 bp, probe
tactcatttctatttgttactcctt

SEQ ID NO: 289154 - DNA, 25 bp, probe
tactgtatgtttggtgctttccttt

SEQ ID NO: 289155 - DNA, 25 bp, probe
tactggtgtactgtttcccattgct

SEQ ID NO: 289156 - DNA, 25 bp, probe
tactggtgtgtgctattcatcccat

SEQ ID NO: 289157 - DNA, 25 bp, probe
tacggtgctgctatgttcatgtaca

SEQ ID NO: 289158 - DNA, 25 bp, probe
tactgagcacctgttgtatgtcaca

SEQ ID NO: 289159 - DNA, 25 bp, probe
tacggaagctcagtgctgtagtcca

SEQ ID NO: 289160 - DNA, 25 bp, probe
tactggagactctggtcagtgccca

SEQ ID NO: 289161 - DNA, 25 bp, probe
tactggaattatgggtgctggttgc

SEQ ID NO: 289162 - DNA, 25 bp, probe
tacgctgaaaatcgcggctttgacc

SEQ ID NO: 289163 - DNA, 25 bp, probe
tacgccaagatcagcgactttggcc

SEQ ID NO: 289164 - DNA, 25 bp, probe
tacgacaagcgctgcgacctgtgga

SEQ ID NO: 289165 - DNA, 25 bp, probe
tactgatagggctgggtctgtgtga

SEQ ID NO: 289166 - DNA, 25 bp, probe
tactgtagtgtttgttgccttgctg

SEQ ID NO: 289167 - DNA, 25 bp, probe
tactgtagagtttttattgctgttt

SEQ ID NO: 289168 - DNA, 25 bp, probe
tactgtctgctttttttggctgctt

SEQ ID NO: 289169 - DNA, 25 bp, probe
tactgtctggtatttaaactgaaac

SEQ ID NO: 289170 - DNA, 25 bp, probe
tactggctgtactatgttaactgag

SEQ ID NO: 289171 - DNA, 25 bp, probe
tacggtgattgctagttgtgactga

SEQ ID NO: 289172 - DNA, 25 bp, probe
tagccaggatccttggtgtcctagg

SEQ ID NO: 289173 - DNA, 25 bp, probe
tactctggacaaggggctcctgaga

SEQ ID NO: 289174 - DNA, 25 bp, probe
tactgtgaactcgggaccctgaggg

SEQ ID NO: 289175 - DNA, 25 bp, probe
taccagatgactgtggagctcctgt

SEQ ID NO: 289176 - DNA, 25 bp, probe
taccgaggctccaaggatgctgcag

SEQ ID NO: 289177 - DNA, 25 bp, probe
taccgtggtccaggttatcagctct

SEQ ID NO: 289178 - DNA, 25 bp, probe
tacccttggcaatgatttagctctt

SEQ ID NO: 289179 - DNA, 25 bp, probe
tagcccttgcgaaggttggtctcga

SEQ ID NO: 289180 - DNA, 25 bp, probe
taccagcttggaagggttgtgtctt

SEQ ID NO: 289181 - DNA, 25 bp, probe
taccagccatggggtttgcttgctt

SEQ ID NO: 289182 - DNA, 25 bp, probe
taccagccatggggtttgcttgctt

SEQ ID NO: 289183 - DNA, 25 bp, probe
tactgcatgctgcggtggttgtgtg

SEQ ID NO: 289184 - DNA, 25 bp, probe
tactgagctcggcatttggagaggg

SEQ ID NO: 289185 - DNA, 25 bp, probe
tactggccacgagtttgcggtgaag

SEQ ID NO: 289186 - DNA, 25 bp, probe
tactgggcaggagtactgtgaggaa

SEQ ID NO: 289187 - DNA, 25 bp, probe
tactgggtggactctgtggccaaga

SEQ ID NO: 289188 - DNA, 25 bp, probe
tactggcatgggattttgtcaaaga

SEQ ID NO: 289189 - DNA, 25 bp, probe
tagacactggaggtttttaacagaa

SEQ ID NO: 289190 - DNA, 25 bp, probe
tatcccaggacgtttgcttacactg

SEQ ID NO: 289191 - DNA, 25 bp, probe
tacccagctgtggttaattacacat

SEQ ID NO: 289192 - DNA, 25 bp, probe
tacctagtctttctatgctccaaat

SEQ ID NO: 289193 - DNA, 25 bp, probe
tactgtaccttactattcctgacaa

SEQ ID NO: 289194 - DNA, 25 bp, probe
tacgtacactgtacttctgtgtgca

SEQ ID NO: 289195 - DNA, 25 bp, probe
tacgaagtggatacctctagtgcaa

SEQ ID NO: 289196 - DNA, 25 bp, probe
tacgccaagcattatgtgctgtgcg

SEQ ID NO: 289197 - DNA, 25 bp, probe
tacgcaatagcgacgcgctggcgtt

SEQ ID NO: 289198 - DNA, 25 bp, probe
taccataagggactgtgccagatgt

SEQ ID NO: 289199 - DNA, 25 bp, probe
taccttcgtcaacttgccgatgtgc

SEQ ID NO: 289200 - DNA, 25 bp, probe
tacgcttcagctgttgatccgctgg

SEQ ID NO: 289201 - DNA, 25 bp, probe
tatcgttcaaactgtccactctgat

SEQ ID NO: 289202 - DNA, 25 bp, probe
tacctggcaaaacgtcctttgcatt

SEQ ID NO: 289203 - DNA, 25 bp, probe
tacgctggaaaaagtgcgcgatgcc

SEQ ID NO: 289204 - DNA, 25 bp, probe
tactgcggaaattcttgtgcgcaca

SEQ ID NO: 289205 - DNA, 25 bp, probe
tactctggaatagtctcagatctaa

SEQ ID NO: 289206 - DNA, 25 bp, probe
taccatggagatccctcagttcgaa

SEQ ID NO: 289207 - DNA, 25 bp, probe
taccgggcacctgagatcatgctca

SEQ ID NO: 289208 - DNA, 25 bp, probe
taccgggcacctgagatcatgctca

SEQ ID NO: 289209 - DNA, 25 bp, probe
tacctgcggcagccgtactatgcca

SEQ ID NO: 289210 - DNA, 25 bp, probe
taccatgcagtcaggattctccact

SEQ ID NO: 289211 - DNA, 25 bp, probe
taccaagtgttgcatcacccacaga

SEQ ID NO: 289212 - DNA, 25 bp, probe
taccaagttatttctcaacctggca

SEQ ID NO: 289213 - DNA, 25 bp, probe
taccaagttatttctcaacctggca

SEQ ID NO: 289214 - DNA, 25 bp, probe
tacgggttttgacttaactcacaag

SEQ ID NO: 289215 - DNA, 25 bp, probe
tacgggattttgccttcactgaaaa

SEQ ID NO: 289216 - DNA, 25 bp, probe
tacgggattttgccttcactgaaaa

SEQ ID NO: 289217 - DNA, 25 bp, probe
tactgagcaatatttccctttagaa

SEQ ID NO: 289218 - DNA, 25 bp, probe
tactgagaataatgcaccaaatcca

SEQ ID NO: 289219 - DNA, 25 bp, probe
tacgggatggcatcatctcagatat

SEQ ID NO: 289220 - DNA, 25 bp, probe
tactgcctgggctaatgctcaaagc

SEQ ID NO: 289221 - DNA, 25 bp, probe
tactgcctgtagcaatggccagagc

SEQ ID NO: 289222 - DNA, 25 bp, probe
tactgtgcatcgtgagggccagaga

SEQ ID NO: 289223 - DNA, 25 bp, probe
tacgagcagctgtgagtgaggggac

SEQ ID NO: 289224 - DNA, 25 bp, probe
taccgcgtgcgcgaggatggggaca

SEQ ID NO: 289225 - DNA, 25 bp, probe
taccgctcgcaggactatggcggcc

SEQ ID NO: 289226 - DNA, 25 bp, probe
taccgctcgcaggactatggcggcc

SEQ ID NO: 289227 - DNA, 25 bp, probe
taccccgctaacaagaagagcccca

SEQ ID NO: 289228 - DNA, 25 bp, probe
tagcgccgtgctgtaaataagccca

SEQ ID NO: 289229 - DNA, 25 bp, probe
tatcagtcctgaagtaattaagttt

SEQ ID NO: 289230 - DNA, 25 bp, probe
tatcagtcctgaagtaattaagttt

SEQ ID NO: 289231 - DNA, 25 bp, probe
tatgcagtgctaggtgttttaagtt

SEQ ID NO: 289232 - DNA, 25 bp, probe
tacgcccagctaattttaagatttt

SEQ ID NO: 289233 - DNA, 25 bp, probe
tactgagccttaatccaccaagttt

SEQ ID NO: 289234 - DNA, 25 bp, probe
tacgtctttattacccaagtcttct

SEQ ID NO: 289235 - DNA, 25 bp, probe
tatcgtttaattaatcaagacccct

SEQ ID NO: 289236 - DNA, 25 bp, probe
tacctattttgtatgcgactccacc

SEQ ID NO: 289237 - DNA, 25 bp, probe
tacctattttgtatgcgactccacc

SEQ ID NO: 289238 - DNA, 25 bp, probe
taccttttagtttcagcagtcctca

SEQ ID NO: 289239 - DNA, 25 bp, probe
taccctttgaacagcagagtgacca

SEQ ID NO: 289240 - DNA, 25 bp, probe
taccctttgtgaactgcagggacgc

SEQ ID NO: 289241 - DNA, 25 bp, probe
tacccagtgggacagaggagcaagg

SEQ ID NO: 289242 - DNA, 25 bp, probe
taccgcctgggacggaagatcggga

SEQ ID NO: 289243 - DNA, 25 bp, probe
tacgcgtctacgaggagaagcggga

SEQ ID NO: 289244 - DNA, 25 bp, probe
tatcaagtcccgaggcagcaacagg

SEQ ID NO: 289245 - DNA, 25 bp, probe
tacggcacccagagtacaacagacc

SEQ ID NO: 289246 - DNA, 25 bp, probe
taccagccccaaagtaacgacacac

SEQ ID NO: 289247 - DNA, 25 bp, probe
taccagccccaaagtaacgacacac

SEQ ID NO: 289248 - DNA, 25 bp, probe
tacctcttatcacagtaaccaactc

SEQ ID NO: 289249 - DNA, 25 bp, probe
tactccttgaaatgtgactcttcag

SEQ ID NO: 289250 - DNA, 25 bp, probe
tactccttaatactagattgatcta

SEQ ID NO: 289251 - DNA, 25 bp, probe
tagctgatgctataagtgaaaacta

SEQ ID NO: 289252 - DNA, 25 bp, probe
tagcttgctcaacaggtgaccttac

SEQ ID NO: 289253 - DNA, 25 bp, probe
tacggctcaaccctggagacattgt

SEQ ID NO: 289254 - DNA, 25 bp, probe
tacgtgctcaacatcgtcaacgtgg

SEQ ID NO: 289255 - DNA, 25 bp, probe
tatcgtgtcttctcccagaagtcag

SEQ ID NO: 289256 - DNA, 25 bp, probe
tacgttttgcagggctcagtacgag

SEQ ID NO: 289257 - DNA, 25 bp, probe
tactgtgtttgagatggctacaggg

SEQ ID NO: 289258 - DNA, 25 bp, probe
tactgtgactcaaagaggtccagag

SEQ ID NO: 289259 - DNA, 25 bp, probe
tactgtacatactagtgttcataga

SEQ ID NO: 289260 - DNA, 25 bp, probe
tactggcctgatgagtatgctctaa

SEQ ID NO: 289261 - DNA, 25 bp, probe
tactggcgtgtggggctgatgtgaa

SEQ ID NO: 289262 - DNA, 25 bp, probe
tactgtctgagggatcactgtgtca

SEQ ID NO: 289263 - DNA, 25 bp, probe
tactgttgctatggtgatcttctca

SEQ ID NO: 289264 - DNA, 25 bp, probe
tactgttggcagtgatcatgatctt

SEQ ID NO: 289265 - DNA, 25 bp, probe
tactggtctcattggcaatgtttcg

SEQ ID NO: 289266 - DNA, 25 bp, probe
tactgctgtctcaaccacaggtttc

SEQ ID NO: 289267 - DNA, 25 bp, probe
tactgctgtctcaaccacaggtttc

SEQ ID NO: 289268 - DNA, 25 bp, probe
tacctcggataccacaagtgctttc

SEQ ID NO: 289269 - DNA, 25 bp, probe
taccatgctcaatgaaaaggtgatt

SEQ ID NO: 289270 - DNA, 25 bp, probe
tagcctgctacttggtgaaggagcg

SEQ ID NO: 289271 - DNA, 25 bp, probe
tagccgcacactagtgtgggaagga

SEQ ID NO: 289272 - DNA, 25 bp, probe
tagccgcacactagtgtgggaagga

SEQ ID NO: 289273 - DNA, 25 bp, probe
taccacagcccgggtgagaagtaaa

SEQ ID NO: 289274 - DNA, 25 bp, probe
tacctcctcctgtgttgtattacac

SEQ ID NO: 289275 - DNA, 25 bp, probe
tacccccagtaaagagctttctcac

SEQ ID NO: 289276 - DNA, 25 bp, probe
tacccccagtaaagagctttctcac

SEQ ID NO: 289277 - DNA, 25 bp, probe
taccagaccagtgtggatttccacc

SEQ ID NO: 289278 - DNA, 25 bp, probe
taccagtccaagttggccatgtcca

SEQ ID NO: 289279 - DNA, 25 bp, probe
taccagcctagctatgggactgctg

SEQ ID NO: 289280 - DNA, 25 bp, probe
taccacctaacactcgagttggcac

SEQ ID NO: 289281 - DNA, 25 bp, probe
tacctcctaaactatagtggctgcc

SEQ ID NO: 289282 - DNA, 25 bp, probe
taccatcccactgatatcacgggcc

SEQ ID NO: 289283 - DNA, 25 bp, probe
tacctgctccttttaatctagtgcc

SEQ ID NO: 289284 - DNA, 25 bp, probe
taccaacctcttgaatggcagctcc

SEQ ID NO: 289285 - DNA, 25 bp, probe
taccaacctcttgaatggcagctcc

SEQ ID NO: 289286 - DNA, 25 bp, probe
taccaatctctgttgaaagaagcca

SEQ ID NO: 289287 - DNA, 25 bp, probe
taccaatctctgttgaaagaagcca

SEQ ID NO: 289288 - DNA, 25 bp, probe
tacctacatgaactgcaaagcaagc

SEQ ID NO: 289289 - DNA, 25 bp, probe
tacctacatgaactgcaaagcaagc

SEQ ID NO: 289290 - DNA, 25 bp, probe
tactgtacatgctatgctgaagaca

SEQ ID NO: 289291 - DNA, 25 bp, probe
tactgtatgctgtcattgtaccatt

SEQ ID NO: 289292 - DNA, 25 bp, probe
tacggcatagcctatgtacatcttt

SEQ ID NO: 289293 - DNA, 25 bp, probe
tacccagcactgtcatctagatttt

SEQ ID NO: 289294 - DNA, 25 bp, probe
tacccagcactgtcatctagatttt

SEQ ID NO: 289295 - DNA, 25 bp, probe
tacgctccagctgatccagatgtta

SEQ ID NO: 289296 - DNA, 25 bp, probe
tacgctccagctgatccagatgtta

SEQ ID NO: 289297 - DNA, 25 bp, probe
tactgactcagtccttagatgtagt

SEQ ID NO: 289298 - DNA, 25 bp, probe
tactggtagatggaacagcatgtgg

SEQ ID NO: 289299 - DNA, 25 bp, probe
tactgagaggggtcaggctgctcgt

SEQ ID NO: 289300 - DNA, 25 bp, probe
tacgagatgtggctcttcgttgttt

SEQ ID NO: 289301 - DNA, 25 bp, probe
tacggagtgggaacacctattggtt

SEQ ID NO: 289302 - DNA, 25 bp, probe
tacgagatggggatccactgctggg

SEQ ID NO: 289303 - DNA, 25 bp, probe
tacggctggtgtgtcatactgtgca

SEQ ID NO: 289304 - DNA, 25 bp, probe
taccagtagtgggcactcaggtgca

SEQ ID NO: 289305 - DNA, 25 bp, probe
tagagcaggatttgaggccaggcca

SEQ ID NO: 289306 - DNA, 25 bp, probe
tatacaatattggggacaccaactg

SEQ ID NO: 289307 - DNA, 25 bp, probe
tatacagactacgtggctaccaggt

SEQ ID NO: 289308 - DNA, 25 bp, probe
tagaggagcccacggctaagaggct

SEQ ID NO: 289309 - DNA, 25 bp, probe
tatgctagagcaccagggtcagggt

SEQ ID NO: 289310 - DNA, 25 bp, probe
tatgctagagcaccagggtcagggt

SEQ ID NO: 289311 - DNA, 25 bp, probe
tatgctctaaaagaatatggcgtca

SEQ ID NO: 289312 - DNA, 25 bp, probe
tagtggaccagacgagtggggatca

SEQ ID NO: 289313 - DNA, 25 bp, probe
taggaaacagaacgtgggcagagac

SEQ ID NO: 289314 - DNA, 25 bp, probe
taggagttgaaatgggtcagacccg

SEQ ID NO: 289315 - DNA, 25 bp, probe
taggagttgaaatgggtcagacccg

SEQ ID NO: 289316 - DNA, 25 bp, probe
taggagttaatttttgtcagcaaca

SEQ ID NO: 289317 - DNA, 25 bp, probe
taggtgctttatttgtagtagcccc

SEQ ID NO: 289318 - DNA, 25 bp, probe
tagattcgtagttagtttagcctac

SEQ ID NO: 289319 - DNA, 25 bp, probe
tagttttagcttcctttgtggctcc

SEQ ID NO: 289320 - DNA, 25 bp, probe
tagttttagcttcctttgtggctcc

SEQ ID NO: 289321 - DNA, 25 bp, probe
tagtggtttctttggtcttgagctc

SEQ ID NO: 289322 - DNA, 25 bp, probe
tagtggtttctttggtcttgagctc

SEQ ID NO: 289323 - DNA, 25 bp, probe
tagagtgtttgcagtggttaattaa

SEQ ID NO: 289324 - DNA, 25 bp, probe
tagcttggtgtcattaacataatta

SEQ ID NO: 289325 - DNA, 25 bp, probe
taccagggtctttgcagatgtaatt

SEQ ID NO: 289326 - DNA, 25 bp, probe
tagcgaggtggcctacatgtttatt

SEQ ID NO: 289327 - DNA, 25 bp, probe
taccaggtagccaagatgatcaatc

SEQ ID NO: 289328 - DNA, 25 bp, probe
taccattgatagcccagtacttcgc

SEQ ID NO: 289329 - DNA, 25 bp, probe
taccattcagaggtgcagtgagttc

SEQ ID NO: 289330 - DNA, 25 bp, probe
taccatccgtgcacatggctttttc

SEQ ID NO: 289331 - DNA, 25 bp, probe
tacctggagtccaagcgctttattc

SEQ ID NO: 289332 - DNA, 25 bp, probe
tacctgggtctggacgtgccagtgt

SEQ ID NO: 289333 - DNA, 25 bp, probe
tacgttatctgcatcacttccaggt

SEQ ID NO: 289334 - DNA, 25 bp, probe
tacgttatctgcatcacttccaggt

SEQ ID NO: 289335 - DNA, 25 bp, probe
tagcgataatctgaaccatgcggtt

SEQ ID NO: 289336 - DNA, 25 bp, probe
tagctgtcaactggaccacaccaga

SEQ ID NO: 289337 - DNA, 25 bp, probe
tacgatgaacatgggatacaaagga

SEQ ID NO: 289338 - DNA, 25 bp, probe
tactggccaacagatgaccaagaga

SEQ ID NO: 289339 - DNA, 25 bp, probe
tactggccaagaatatgctgcaaaa

SEQ ID NO: 289340 - DNA, 25 bp, probe
tactggcttcagaaagctaattaag

SEQ ID NO: 289341 - DNA, 25 bp, probe
tactgtgcttccaacgtcattgatc

SEQ ID NO: 289342 - DNA, 25 bp, probe
tactgtgcttccaacgtcattgatc

SEQ ID NO: 289343 - DNA, 25 bp, probe
tactgtgtggccacgtacgtgctgg

SEQ ID NO: 289344 - DNA, 25 bp, probe
tactgtaggcacactttgcactgat

SEQ ID NO: 289345 - DNA, 25 bp, probe
tactgtaggcctcctaagtctaata

SEQ ID NO: 289346 - DNA, 25 bp, probe
tagagtaggttgctatggttttatc

SEQ ID NO: 289347 - DNA, 25 bp, probe
tagaatgagggcctttagtttaaat

SEQ ID NO: 289348 - DNA, 25 bp, probe
tagaatgagggcctttagtttaaat

SEQ ID NO: 289349 - DNA, 25 bp, probe
tagaaagtcagcccttagattcaga

SEQ ID NO: 289350 - DNA, 25 bp, probe
tagagatgtgtacctgcttagttaa

SEQ ID NO: 289351 - DNA, 25 bp, probe
tactggatgcaaactgttatgtaaa

SEQ ID NO: 289352 - DNA, 25 bp, probe
tactgtacatagatgtatcattaat

SEQ ID NO: 289353 - DNA, 25 bp, probe
tagcatcaactagaataatctacat

SEQ ID NO: 289354 - DNA, 25 bp, probe
tagctcaaccaatggagagctgaat

SEQ ID NO: 289355 - DNA, 25 bp, probe
tagctcatacggaatggacagccga

SEQ ID NO: 289356 - DNA, 25 bp, probe
tagcactcatcgcatgaggacagag

SEQ ID NO: 289357 - DNA, 25 bp, probe
tacctgcagctggtggcaagcgtgg

SEQ ID NO: 289358 - DNA, 25 bp, probe
tacgctatgtgcttggcgtgtggga

SEQ ID NO: 289359 - DNA, 25 bp, probe
tacgtgagtcctggcatgggaatga

SEQ ID NO: 289360 - DNA, 25 bp, probe
tacgtgagtcctggcatgggaatga

SEQ ID NO: 289361 - DNA, 25 bp, probe
tacgggatctcagtggaggacaaga

SEQ ID NO: 289362 - DNA, 25 bp, probe
tacgggatctcagtggaggacaaga

SEQ ID NO: 289363 - DNA, 25 bp, probe
tagcagcagaattcattgtcggaag

SEQ ID NO: 289364 - DNA, 25 bp, probe
tagcagcaacagtcaggagggcggt

SEQ ID NO: 289365 - DNA, 25 bp, probe
tatcacctacacggagggtggggag

SEQ ID NO: 289366 - DNA, 25 bp, probe
tacggtatcagagactggtggtgga

SEQ ID NO: 289367 - DNA, 25 bp, probe
tacgggaaggccgtagatgtgtggg

SEQ ID NO: 289368 - DNA, 25 bp, probe
tacggcgcaagagcctgcagtgggc

SEQ ID NO: 289369 - DNA, 25 bp, probe
tacgtggagcacgacctcaagagcc

SEQ ID NO: 289370 - DNA, 25 bp, probe
tactgggagatgaccaatcaagatg

SEQ ID NO: 289371 - DNA, 25 bp, probe
tactgggacatgaacgagcaggagg

SEQ ID NO: 289372 - DNA, 25 bp, probe
tacggcaccatgaagtagcggcaat

SEQ ID NO: 289373 - DNA, 25 bp, probe
tacccatcgtgtggtacgtcacatc

SEQ ID NO: 289374 - DNA, 25 bp, probe
taccgcagagtatttgaagtcacac

SEQ ID NO: 289375 - DNA, 25 bp, probe
tacccatgatgaaattgaagctcag

SEQ ID NO: 289376 - DNA, 25 bp, probe
tacccataaacactgccatcatcta

SEQ ID NO: 289377 - DNA, 25 bp, probe
tacccaaaatgcagacagatactaa

SEQ ID NO: 289378 - DNA, 25 bp, probe
tacccaatgcaaattacttacttct

SEQ ID NO: 289379 - DNA, 25 bp, probe
tacccaatgcagtttggctttttaa

SEQ ID NO: 289380 - DNA, 25 bp, probe
tacctcaaaagcaggctttgggaca

SEQ ID NO: 289381 - DNA, 25 bp, probe
tacgctaaaaccaacttgtgccaac

SEQ ID NO: 289382 - DNA, 25 bp, probe
taccgtaacacgaaattgctgtcaa

SEQ ID NO: 289383 - DNA, 25 bp, probe
taccagaaaatcatgaaacggctca

SEQ ID NO: 289384 - DNA, 25 bp, probe
taccagaaaatcatgaaacggctca

SEQ ID NO: 289385 - DNA, 25 bp, probe
taccaggagttggtaacatccactc

SEQ ID NO: 289386 - DNA, 25 bp, probe
tatagcaatggcacgtcaaacccca

SEQ ID NO: 289387 - DNA, 25 bp, probe
tatcaccattgcagttcaaaacaaa

SEQ ID NO: 289388 - DNA, 25 bp, probe
tacctgcatgtgttgtacaatacca

SEQ ID NO: 289389 - DNA, 25 bp, probe
tacccagggtttttcagctcattac

SEQ ID NO: 289390 - DNA, 25 bp, probe
taccacgggtgatagccagactgct

SEQ ID NO: 289391 - DNA, 25 bp, probe
tacgtgcgggtggggctgcagaaga

SEQ ID NO: 289392 - DNA, 25 bp, probe
tacgtgcgggtggggctgcagaaga

SEQ ID NO: 289393 - DNA, 25 bp, probe
tactggctggggtaggcctcagtga

SEQ ID NO: 289394 - DNA, 25 bp, probe
tactggctggggtaggcctcagtga

SEQ ID NO: 289395 - DNA, 25 bp, probe
tactgggggatttagtgccactgaa

SEQ ID NO: 289396 - DNA, 25 bp, probe
tacggcgtggtttatgaggcagtgg

SEQ ID NO: 289397 - DNA, 25 bp, probe
tacctccggtattgtacggctggct

SEQ ID NO: 289398 - DNA, 25 bp, probe
tacccgaaatgatgtactggatgac

SEQ ID NO: 289399 - DNA, 25 bp, probe
taccggacagagagccacgtcttct

SEQ ID NO: 289400 - DNA, 25 bp, probe
taccggacagagagccacgtcttct

SEQ ID NO: 289401 - DNA, 25 bp, probe
taccgcgaggagagcgacagcctgg

SEQ ID NO: 289402 - DNA, 25 bp, probe
taccgctgaggagatgtccagcttg

SEQ ID NO: 289403 - DNA, 25 bp, probe
tagctcaatattcaattctagcttt

SEQ ID NO: 289404 - DNA, 25 bp, probe
tagccagatttcgaaattacttttt

SEQ ID NO: 289405 - DNA, 25 bp, probe
taccaacgtcgagatgatgaatttt

SEQ ID NO: 289406 - DNA, 25 bp, probe
tacgacctggtagtgagaacatttt

SEQ ID NO: 289407 - DNA, 25 bp, probe
tagacggccgtagaaaagatttata

SEQ ID NO: 289408 - DNA, 25 bp, probe
tatcctggcggttgaaaagttttct

SEQ ID NO: 289409 - DNA, 25 bp, probe
tattctcgccgcaaaaacgttcgcc

SEQ ID NO: 289410 - DNA, 25 bp, probe
tattctcgccgcaaaaacgttcgcc

SEQ ID NO: 289411 - DNA, 25 bp, probe
tacctcgggaatgaacttccgcttt

SEQ ID NO: 289412 - DNA, 25 bp, probe
taccttggggacgaagcgtatcagc

SEQ ID NO: 289413 - DNA, 25 bp, probe
tacctttgtaaaacagcctatagat

SEQ ID NO: 289414 - DNA, 25 bp, probe
taccctttttatgcatatcaatagt

SEQ ID NO: 289415 - DNA, 25 bp, probe
tacgtttatttagctctcttcgata

SEQ ID NO: 289416 - DNA, 25 bp, probe
tacgggtgttgaaggtgtcttcaga

SEQ ID NO: 289417 - DNA, 25 bp, probe
tacgagggtggaacgcatgtcctga

SEQ ID NO: 289418 - DNA, 25 bp, probe
tacggggtggacgtcatggcccgag

SEQ ID NO: 289419 - DNA, 25 bp, probe
tacgcgtgcatgcgacgtcatagct

SEQ ID NO: 289420 - DNA, 25 bp, probe
tacgagctgatgcgtcagtgctggc

SEQ ID NO: 289421 - DNA, 25 bp, probe
tacgtgctcatgctggagtgctgga

SEQ ID NO: 289422 - DNA, 25 bp, probe
tacgtgctcatgctggagtgctgga

SEQ ID NO: 289423 - DNA, 25 bp, probe
tactggccatgcctggagacatatc

SEQ ID NO: 289424 - DNA, 25 bp, probe
tactggtcatgcctgctgtgggcat

SEQ ID NO: 289425 - DNA, 25 bp, probe
tacgaacagcctggtggtgtcgggt

SEQ ID NO: 289426 - DNA, 25 bp, probe
tagcgaggagccagatagtgcctga

SEQ ID NO: 289427 - DNA, 25 bp, probe
taccacgctgacaggtgtgcttgaa

SEQ ID NO: 289428 - DNA, 25 bp, probe
taccagccgaggctgtgcgggcaac

SEQ ID NO: 289429 - DNA, 25 bp, probe
taccagccgaggctgtgcgggcaac

SEQ ID NO: 289430 - DNA, 25 bp, probe
tacctgccggagagtgtcagaactc

SEQ ID NO: 289431 - DNA, 25 bp, probe
tatccttcttagaagcttcgaactc

SEQ ID NO: 289432 - DNA, 25 bp, probe
taccatactttgaacccttgactct

SEQ ID NO: 289433 - DNA, 25 bp, probe
taccaacatatgggccccatctgca

SEQ ID NO: 289434 - DNA, 25 bp, probe
tagcctcacaatggtgcaccgtttt

SEQ ID NO: 289435 - DNA, 25 bp, probe
tacgtaagatggtgcttgctctatt

SEQ ID NO: 289436 - DNA, 25 bp, probe
tacgtaagatggtgcttgctctatt

SEQ ID NO: 289437 - DNA, 25 bp, probe
tacgtgcgagatggcaacatcctct

SEQ ID NO: 289438 - DNA, 25 bp, probe
tacctgcaagcagaacttccaaaga

SEQ ID NO: 289439 - DNA, 25 bp, probe
taccccaaagaaaatcctagcaagc

SEQ ID NO: 289440 - DNA, 25 bp, probe
taccccaaagaaaatcctagcaagc

SEQ ID NO: 289441 - DNA, 25 bp, probe
taccccaaaagattagccttgtaca

SEQ ID NO: 289442 - DNA, 25 bp, probe
taccccgacacaaggagctcttgtt

SEQ ID NO: 289443 - DNA, 25 bp, probe
tacgccctgaagcgaatcctgtgtc

SEQ ID NO: 289444 - DNA, 25 bp, probe
taccaagcaggacagacactcggcc

SEQ ID NO: 289445 - DNA, 25 bp, probe
tagcctaggaagtgccctcgagcac

SEQ ID NO: 289446 - DNA, 25 bp, probe
tagactttgaagtgaccctccacga

SEQ ID NO: 289447 - DNA, 25 bp, probe
ttacttggactatgcccagtctcgg

SEQ ID NO: 289448 - DNA, 25 bp, probe
ttacatcggagcacaccgagggctg

SEQ ID NO: 289449 - DNA, 25 bp, probe
tatagcataataaagccccgggcat

SEQ ID NO: 289450 - DNA, 25 bp, probe
tagagctaatacatgccgacgggcg

SEQ ID NO: 289451 - DNA, 25 bp, probe
tagcctcatttcttacagacgggga

SEQ ID NO: 289452 - DNA, 25 bp, probe
taccgcatctatgtcacagctaagg

SEQ ID NO: 289453 - DNA, 25 bp, probe
tacccatgtagcagcaacttgaacg

SEQ ID NO: 289454 - DNA, 25 bp, probe
tacccatgctccagcaaggagttca

SEQ ID NO: 289455 - DNA, 25 bp, probe
taccagtcaggtaccaggagtctaa

SEQ ID NO: 289456 - DNA, 25 bp, probe
taccctgggtatgcaggacccacta

SEQ ID NO: 289457 - DNA, 25 bp, probe
tacccagtggtgtgagggctccagc

SEQ ID NO: 289458 - DNA, 25 bp, probe
taccctgtggtgaaggagcagtccc

SEQ ID NO: 289459 - DNA, 25 bp, probe
tacgcctctttgcaaaggacctcag

SEQ ID NO: 289460 - DNA, 25 bp, probe
tacgcctctttgcaaaggacctcag

SEQ ID NO: 289461 - DNA, 25 bp, probe
tacccttctattcagggaacacgat

SEQ ID NO: 289462 - DNA, 25 bp, probe
tacccttcttttatgagcagaagga

SEQ ID NO: 289463 - DNA, 25 bp, probe
taccctcctctcgcatttaaaagta

SEQ ID NO: 289464 - DNA, 25 bp, probe
taccccctgctgcttttgagaaatt

SEQ ID NO: 289465 - DNA, 25 bp, probe
taccccctgctgcttttgagaaatt

SEQ ID NO: 289466 - DNA, 25 bp, probe
taccctgccagttcttttagggatt

SEQ ID NO: 289467 - DNA, 25 bp, probe
tacccagacacttcttttggtgtga

SEQ ID NO: 289468 - DNA, 25 bp, probe
tacccagacacttcttttggtgtga

SEQ ID NO: 289469 - DNA, 25 bp, probe
taccagatgaccacaagttgcgttg

SEQ ID NO: 289470 - DNA, 25 bp, probe
taccagatgaccacaagttgcgttg

SEQ ID NO: 289471 - DNA, 25 bp, probe
taccagccccatcaggttgttgtga

SEQ ID NO: 289472 - DNA, 25 bp, probe
taccaatctcctgaggcttgtggat

SEQ ID NO: 289473 - DNA, 25 bp, probe
taccctcacagtgaggccctcagac

SEQ ID NO: 289474 - DNA, 25 bp, probe
taccactgcaagtgactgctgtccg

SEQ ID NO: 289475 - DNA, 25 bp, probe
tacccatgaatgtgagcttaccagg

SEQ ID NO: 289476 - DNA, 25 bp, probe
tacccatgaatgtgagcttaccagg

SEQ ID NO: 289477 - DNA, 25 bp, probe
tacccagaattcttgttcacaaagt

SEQ ID NO: 289478 - DNA, 25 bp, probe
taccctaatgtcttcataaagtact

SEQ ID NO: 289479 - DNA, 25 bp, probe
taccctaatgtcttcataaagtact

SEQ ID NO: 289480 - DNA, 25 bp, probe
taccgaggagtattctgagaagttt

SEQ ID NO: 289481 - DNA, 25 bp, probe
taccagcaggaggttctgggcctct

SEQ ID NO: 289482 - DNA, 25 bp, probe
taccagaggcagcaccggctgcccg

SEQ ID NO: 289483 - DNA, 25 bp, probe
taccaggagctgcacgtggactccg

SEQ ID NO: 289484 - DNA, 25 bp, probe
taccacgagcccagatgtgaccttt

SEQ ID NO: 289485 - DNA, 25 bp, probe
tacgacgagagcgaccctgagctct

SEQ ID NO: 289486 - DNA, 25 bp, probe
tacgacgagagcgaccctgagctct

SEQ ID NO: 289487 - DNA, 25 bp, probe
tagctacgagatggtaccgagctcc

SEQ ID NO: 289488 - DNA, 25 bp, probe
taccagtgcagggtgacccacaccc

SEQ ID NO: 289489 - DNA, 25 bp, probe
taccaggaagaggggcgctgccccc

SEQ ID NO: 289490 - DNA, 25 bp, probe
taccaggaatggatgtcgctaatca

SEQ ID NO: 289491 - DNA, 25 bp, probe
tacgcaggacattcttgccgtattc

SEQ ID NO: 289492 - DNA, 25 bp, probe
taccgagacgacggcctgaagatct

SEQ ID NO: 289493 - DNA, 25 bp, probe
taccgagacgacggcctgaagatct

SEQ ID NO: 289494 - DNA, 25 bp, probe
tacgcgaggcagaggctcggaaccg

SEQ ID NO: 289495 - DNA, 25 bp, probe
tatgtgcaggaccttagctcggacc

SEQ ID NO: 289496 - DNA, 25 bp, probe
tagctgggacgcatagctaatactt

SEQ ID NO: 289497 - DNA, 25 bp, probe
tacgagcaacgaataataacctgga

SEQ ID NO: 289498 - DNA, 25 bp, probe
tacccagggatgtcaaaccctgaag

SEQ ID NO: 289499 - DNA, 25 bp, probe
tacccagggatgaccaacccggagg

SEQ ID NO: 289500 - DNA, 25 bp, probe
tacccagggatgaccaacccggagg

SEQ ID NO: 289501 - DNA, 25 bp, probe
tacccagggatgagcaaccccgagg

SEQ ID NO: 289502 - DNA, 25 bp, probe
tatcctgagggtccgaacccgtggt

SEQ ID NO: 289503 - DNA, 25 bp, probe
tatcctgagggtccgaacccgtggt

SEQ ID NO: 289504 - DNA, 25 bp, probe
tacctgggtgttgaggcccacgact

SEQ ID NO: 289505 - DNA, 25 bp, probe
tacctaggtctcagggcacggaggc

SEQ ID NO: 289506 - DNA, 25 bp, probe
tacctaggtctcagggcacggaggc

SEQ ID NO: 289507 - DNA, 25 bp, probe
tacgctgaggacatggggccagggg

SEQ ID NO: 289508 - DNA, 25 bp, probe
tagcgaaggcactgggtgcacgggc

SEQ ID NO: 289509 - DNA, 25 bp, probe
tagccttagcagtgggtatgaggtg

SEQ ID NO: 289510 - DNA, 25 bp, probe
tagccatcccttggggaagggtggg

SEQ ID NO: 289511 - DNA, 25 bp, probe
tagctcctcccctggagggggaatg

SEQ ID NO: 289512 - DNA, 25 bp, probe
tagctcctcccctggagggggaatg

SEQ ID NO: 289513 - DNA, 25 bp, probe
tttccccaatccccaggaatggaca

SEQ ID NO: 289514 - DNA, 25 bp, probe
tttttccaaaatccgccgtggacag

SEQ ID NO: 289515 - DNA, 25 bp, probe
tttcttctaacctggcaaggagaga

SEQ ID NO: 289516 - DNA, 25 bp, probe
tttggattaaccggctgcagagggt

SEQ ID NO: 289517 - DNA, 25 bp, probe
tttggctaagacgggttggggagca

SEQ ID NO: 289518 - DNA, 25 bp, probe
tttggctaagacgggttggggagca

SEQ ID NO: 289519 - DNA, 25 bp, probe
ttttctgggtttgctgtggggacct

SEQ ID NO: 289520 - DNA, 25 bp, probe
tttttggtttctcttgtaagacatc

SEQ ID NO: 289521 - DNA, 25 bp, probe
ttaaagcacctttgttagtaaacag

SEQ ID NO: 289522 - DNA, 25 bp, probe
tttaacccataacatgagttgcaaa

SEQ ID NO: 289523 - DNA, 25 bp, probe
tttcagaactcaaagggcatttaga

SEQ ID NO: 289524 - DNA, 25 bp, probe
tatacagaactcacagtacctatga

SEQ ID NO: 289525 - DNA, 25 bp, probe
ttacaggccccaattatccaatagt

SEQ ID NO: 289526 - DNA, 25 bp, probe
taccatgaccccaatttatccaagt

SEQ ID NO: 289527 - DNA, 25 bp, probe
tacctgtatctctaagtgttgctca

SEQ ID NO: 289528 - DNA, 25 bp, probe
tacctggtcatctggtgtgctgatc

SEQ ID NO: 289529 - DNA, 25 bp, probe
tacctggtcatctggtgtgctgatc

SEQ ID NO: 289530 - DNA, 25 bp, probe
tacctggatgacatcgcttccatgc

SEQ ID NO: 289531 - DNA, 25 bp, probe
tacctgggcagtgcgtatcacgctt

SEQ ID NO: 289532 - DNA, 25 bp, probe
tacgcgggcattgatgccacagctg

SEQ ID NO: 289533 - DNA, 25 bp, probe
tacgctccaactgatccagatgcta

SEQ ID NO: 289534 - DNA, 25 bp, probe
tacgctccaactgatccagatgcta

SEQ ID NO: 289535 - DNA, 25 bp, probe
tagctattcgacagcatgccaatct

SEQ ID NO: 289536 - DNA, 25 bp, probe
tacgtcctgatcgacatggttctca

SEQ ID NO: 289537 - DNA, 25 bp, probe
tacgacctgagatctgctggctcaa

SEQ ID NO: 289538 - DNA, 25 bp, probe
tacccctatgcagtgtattgccaaa

SEQ ID NO: 289539 - DNA, 25 bp, probe
tacgtcagctcagctgtgactcctc

SEQ ID NO: 289540 - DNA, 25 bp, probe
tacgacttcaggaggctcctgcgca

SEQ ID NO: 289541 - DNA, 25 bp, probe
tatagacttcccagcagcatttcac

SEQ ID NO: 289542 - DNA, 25 bp, probe
tagaattgtccagagcttcttgcag

SEQ ID NO: 289543 - DNA, 25 bp, probe
tagacattcctcgtcagtattagga

SEQ ID NO: 289544 - DNA, 25 bp, probe
taccttttcccgactgtaagcagtt

SEQ ID NO: 289545 - DNA, 25 bp, probe
tacctcatttacagtcagaaagctt

SEQ ID NO: 289546 - DNA, 25 bp, probe
taccttgtatactgtaggcacactt

SEQ ID NO: 289547 - DNA, 25 bp, probe
tacctggctttctgttggctattta

SEQ ID NO: 289548 - DNA, 25 bp, probe
tacctgtttatctgttaactattat

SEQ ID NO: 289549 - DNA, 25 bp, probe
tacctctattttaattactgctata

SEQ ID NO: 289550 - DNA, 25 bp, probe
tacctcatccatgcactttaattga

SEQ ID NO: 289551 - DNA, 25 bp, probe
tacgtcaggcagaattcttcaatta

SEQ ID NO: 289552 - DNA, 25 bp, probe
tagtgactgcggatgtttacactga

SEQ ID NO: 289553 - DNA, 25 bp, probe
tagtgggggcgtttttgcagtaagg

SEQ ID NO: 289554 - DNA, 25 bp, probe
ttgtgggaggccagttctggtccgt

SEQ ID NO: 289555 - DNA, 25 bp, probe
tatgggaaccaacgtcatcgttgcc

SEQ ID NO: 289556 - DNA, 25 bp, probe
tatgttacccagagaactttccaaa

SEQ ID NO: 289557 - DNA, 25 bp, probe
tttccacctctgggataccttacta

SEQ ID NO: 289558 - DNA, 25 bp, probe
tataccctctcggggacattaaaat

SEQ ID NO: 289559 - DNA, 25 bp, probe
tataaccccggtgctctaaaataag

SEQ ID NO: 289560 - DNA, 25 bp, probe
tataaccccggtgctctaaaataag

SEQ ID NO: 289561 - DNA, 25 bp, probe
tataagagccctgggtcatttacaa

SEQ ID NO: 289562 - DNA, 25 bp, probe
tatcctgaccttgcaaagttacgca

SEQ ID NO: 289563 - DNA, 25 bp, probe
tacctgaagtctgaacctatcccag

SEQ ID NO: 289564 - DNA, 25 bp, probe
tacctggcaactgaacccatcatca

SEQ ID NO: 289565 - DNA, 25 bp, probe
tacctggattcagatgactcatccc

SEQ ID NO: 289566 - DNA, 25 bp, probe
tacctgcgcttgaaggacatcatcc

SEQ ID NO: 289567 - DNA, 25 bp, probe
tacctgcgcttgaaggacatcatcc

SEQ ID NO: 289568 - DNA, 25 bp, probe
tacgttgcattgtgccaacatcagc

SEQ ID NO: 289569 - DNA, 25 bp, probe
tagcagttctttagccatacatatc

SEQ ID NO: 289570 - DNA, 25 bp, probe
ttgcagtttgtaccaattcacccac

SEQ ID NO: 289571 - DNA, 25 bp, probe
tagccttcttaggcaaacgcctgca

SEQ ID NO: 289572 - DNA, 25 bp, probe
taccttttgggatgattgctcgatt

SEQ ID NO: 289573 - DNA, 25 bp, probe
taccttttgggatgattgctcgatt

SEQ ID NO: 289574 - DNA, 25 bp, probe
taccttaatatgcaagactctcaag

SEQ ID NO: 289575 - DNA, 25 bp, probe
taccttcaataatggactatgctat

SEQ ID NO: 289576 - DNA, 25 bp, probe
taccccaaaagccgtgatgtgcaat

SEQ ID NO: 289577 - DNA, 25 bp, probe
tacctccataaaacagtagcacaaa

SEQ ID NO: 289578 - DNA, 25 bp, probe
taccttattcaaacatcaacaacag

SEQ ID NO: 289579 - DNA, 25 bp, probe
tacctcattttagagcacacaaaac

SEQ ID NO: 289580 - DNA, 25 bp, probe
tacctatccatatgcatcagaatca

SEQ ID NO: 289581 - DNA, 25 bp, probe
tagcctacctcatgcatagtaacga

SEQ ID NO: 289582 - DNA, 25 bp, probe
tagcctacctcatgcatagtaacga

SEQ ID NO: 289583 - DNA, 25 bp, probe
tagcctacctcatgcatagtaacga

SEQ ID NO: 289584 - DNA, 25 bp, probe
taccaaccatcacggcagtttgcaa

SEQ ID NO: 289585 - DNA, 25 bp, probe
taccaaccatcacggcagtttgcaa

SEQ ID NO: 289586 - DNA, 25 bp, probe
tacctcaccatcctgtgcatttaga

SEQ ID NO: 289587 - DNA, 25 bp, probe
tacctcagccatcggtctagcatat

SEQ ID NO: 289588 - DNA, 25 bp, probe
tacctcagccatcggtctagcatat

SEQ ID NO: 289589 - DNA, 25 bp, probe
tagcgatcgctgccaggatatacgt

SEQ ID NO: 289590 - DNA, 25 bp, probe
taggtctgggggactacgtacctga

SEQ ID NO: 289591 - DNA, 25 bp, probe
taggtctgggggactacgtacctga

SEQ ID NO: 289592 - DNA, 25 bp, probe
tatggtagggggagagggacctgcc

SEQ ID NO: 289593 - DNA, 25 bp, probe
tagagaaggacccggaggggcctgg

SEQ ID NO: 289594 - DNA, 25 bp, probe
tatggaaaactctatcgggggccta

SEQ ID NO: 289595 - DNA, 25 bp, probe
tatggaaaactctatcgggggccta

SEQ ID NO: 289596 - DNA, 25 bp, probe
tagaaaacctaaatgctggggcaca

SEQ ID NO: 289597 - DNA, 25 bp, probe
tagaaaattcactattggctgggag

SEQ ID NO: 289598 - DNA, 25 bp, probe
tagaaaattcactattggctgggag

SEQ ID NO: 289599 - DNA, 25 bp, probe
tagctaagtccatcgtgttggtcaa

SEQ ID NO: 289600 - DNA, 25 bp, probe
tagctattgcttattgtcctggtcc

SEQ ID NO: 289601 - DNA, 25 bp, probe
tagtgtcagtaacaggctcggttct

SEQ ID NO: 289602 - DNA, 25 bp, probe
tagggggacagctgtggctggtcct

SEQ ID NO: 289603 - DNA, 25 bp, probe
tagggggacagctgtggctggtcct

SEQ ID NO: 289604 - DNA, 25 bp, probe
taggggctactgggaagttgtcagc

SEQ ID NO: 289605 - DNA, 25 bp, probe
taggggctactgggaagttgtcagc

SEQ ID NO: 289606 - DNA, 25 bp, probe
tacgccgctttctgacactttcact

SEQ ID NO: 289607 - DNA, 25 bp, probe
tacctgcctttaaggacttcctgtt

SEQ ID NO: 289608 - DNA, 25 bp, probe
tacctccatttagggatttgcttgg

SEQ ID NO: 289609 - DNA, 25 bp, probe
taccttctttaccagatgctttgtg

SEQ ID NO: 289610 - DNA, 25 bp, probe
taccctcttttgaagatgttctcta

SEQ ID NO: 289611 - DNA, 25 bp, probe
taccctgcagtttgtgaatttttgc

SEQ ID NO: 289612 - DNA, 25 bp, probe
tacccatagtctttgtgtgcttgct

SEQ ID NO: 289613 - DNA, 25 bp, probe
tacccatagtctttgtgtgcttgct

SEQ ID NO: 289614 - DNA, 25 bp, probe
taccacttgctattattagcattta

SEQ ID NO: 289615 - DNA, 25 bp, probe
tacctcttgctattttgttatatat

SEQ ID NO: 289616 - DNA, 25 bp, probe
taccactgtcaagtatagccgagaa

SEQ ID NO: 289617 - DNA, 25 bp, probe
taccctgtgccagaagcaacagagg

SEQ ID NO: 289618 - DNA, 25 bp, probe
tagcctttgcccacaagagaatgac

SEQ ID NO: 289619 - DNA, 25 bp, probe
tagcctttgcccacaagagaatgac

SEQ ID NO: 289620 - DNA, 25 bp, probe
tttgtttagactgaaggaagacgtt

SEQ ID NO: 289621 - DNA, 25 bp, probe
ttatttttactctctggaaaaggag

SEQ ID NO: 289622 - DNA, 25 bp, probe
tagacgtttactttgtagaaacagg

SEQ ID NO: 289623 - DNA, 25 bp, probe
tagacgtgttaaattcagacgtact

SEQ ID NO: 289624 - DNA, 25 bp, probe
tacctgctgttaagaaagatccttc

SEQ ID NO: 289625 - DNA, 25 bp, probe
tacctctttaggtcactgatggtca

SEQ ID NO: 289626 - DNA, 25 bp, probe
taccacttgtgtggaactgattgtt

SEQ ID NO: 289627 - DNA, 25 bp, probe
tagaaccatggtcgccactgttttc

SEQ ID NO: 289628 - DNA, 25 bp, probe
tagaaccatggtcgccactgttttc

SEQ ID NO: 289629 - DNA, 25 bp, probe
tagaaccttgttgcctgtgtctatg

SEQ ID NO: 289630 - DNA, 25 bp, probe
tagaaccttgttgcctgtgtctatg

SEQ ID NO: 289631 - DNA, 25 bp, probe
tagcaacccatgtttcctgggaaac

SEQ ID NO: 289632 - DNA, 25 bp, probe
tagaccacgatgttacatccgcaaa

SEQ ID NO: 289633 - DNA, 25 bp, probe
tagaccctgtttcctttcaggaggg

SEQ ID NO: 289634 - DNA, 25 bp, probe
tagcaacactgttttctttacgaga

SEQ ID NO: 289635 - DNA, 25 bp, probe
taccaccttaaccatttgaaagtat

SEQ ID NO: 289636 - DNA, 25 bp, probe
taggggctttgacattgggaaccat

SEQ ID NO: 289637 - DNA, 25 bp, probe
taggggccttatcagtgtgaaatta

SEQ ID NO: 289638 - DNA, 25 bp, probe
taggggtcttgattaattaaacgat

SEQ ID NO: 289639 - DNA, 25 bp, probe
taggggtcttgattaattaaacgat

SEQ ID NO: 289640 - DNA, 25 bp, probe
taggttcgttcttatttaaagcaat

SEQ ID NO: 289641 - DNA, 25 bp, probe
tagaggggtattcttcttgaaaata

SEQ ID NO: 289642 - DNA, 25 bp, probe
tagggtggactaactttggacacaa

SEQ ID NO: 289643 - DNA, 25 bp, probe
taggagagtgccaaactcagggacc

SEQ ID NO: 289644 - DNA, 25 bp, probe
taggaactggtgtcttcaggggcca

SEQ ID NO: 289645 - DNA, 25 bp, probe
tagggatctagctcttcgagtggat

SEQ ID NO: 289646 - DNA, 25 bp, probe
agtgttggaattctttggtgtaaat

SEQ ID NO: 289647 - DNA, 25 bp, probe
ttggtcgtgatctgtacaggggctt

SEQ ID NO: 289648 - DNA, 25 bp, probe
tagtctcttgcatggtaagacggtc

SEQ ID NO: 289649 - DNA, 25 bp, probe
tatacattatgatcttaagccaggt

SEQ ID NO: 289650 - DNA, 25 bp, probe
tatacacatcaggttgtaaccaggt

SEQ ID NO: 289651 - DNA, 25 bp, probe
tagcactgccagattctaaaaggtt

SEQ ID NO: 289652 - DNA, 25 bp, probe
tagctcttcgatacttacacaagga

SEQ ID NO: 289653 - DNA, 25 bp, probe
tacgcttcagagataccaatgggca

SEQ ID NO: 289654 - DNA, 25 bp, probe
tagccctgcacaagtaccttaagca

SEQ ID NO: 289655 - DNA, 25 bp, probe
tagccctgcacaagtaccttaagca

SEQ ID NO: 289656 - DNA, 25 bp, probe
tagctaaaaccttccatgtcaagat

SEQ ID NO: 289657 - DNA, 25 bp, probe
ttctgaaaccccacttaagcattgt

SEQ ID NO: 289658 - DNA, 25 bp, probe
tttaataccaagtccttaggagtct

SEQ ID NO: 289659 - DNA, 25 bp, probe
tacgaattcaccttccgaaggttct

SEQ ID NO: 289660 - DNA, 25 bp, probe
ttcaactatccagaccagtacgttc

SEQ ID NO: 289661 - DNA, 25 bp, probe
ttctggcccgaggcccttagagtat

SEQ ID NO: 289662 - DNA, 25 bp, probe
tttgaacactgagccttttgaactc

SEQ ID NO: 289663 - DNA, 25 bp, probe
tatggaacgaaaactgctttgtaat

SEQ ID NO: 289664 - DNA, 25 bp, probe
taggtttcaagaggccttataaatg

SEQ ID NO: 289665 - DNA, 25 bp, probe
tagttctaaagagactgtttggaaa

SEQ ID NO: 289666 - DNA, 25 bp, probe
tagatttcttaaaacttactgtgga

SEQ ID NO: 289667 - DNA, 25 bp, probe
tagctttttcaaaatttctatttct

SEQ ID NO: 289668 - DNA, 25 bp, probe
tatccttttataactctaccacttt

SEQ ID NO: 289669 - DNA, 25 bp, probe
tagtttatcttacatcagacccttt

SEQ ID NO: 289670 - DNA, 25 bp, probe
tagcccatttttctagactgtctct

SEQ ID NO: 289671 - DNA, 25 bp, probe
taccctccactaagtagcaagttca

SEQ ID NO: 289672 - DNA, 25 bp, probe
tacccatctaccaaaagcagatatt

SEQ ID NO: 289673 - DNA, 25 bp, probe
tagcccaaactcaactctcaatcta

SEQ ID NO: 289674 - DNA, 25 bp, probe
tacctcaagacctatgttacagcat

SEQ ID NO: 289675 - DNA, 25 bp, probe
tacccagagggcttgcattggtcag

SEQ ID NO: 289676 - DNA, 25 bp, probe
tacccagacgagctgcagtgcctgg

SEQ ID NO: 289677 - DNA, 25 bp, probe
tacccagacgagctgcagtgcctgg

SEQ ID NO: 289678 - DNA, 25 bp, probe
tacccaccagattacaatcctgaag

SEQ ID NO: 289679 - DNA, 25 bp, probe
tagccaatacaaatcaaatgccgga

SEQ ID NO: 289680 - DNA, 25 bp, probe
tagccttgacaaacagcagacccta

SEQ ID NO: 289681 - DNA, 25 bp, probe
tagcgcaggacatcacaaggaccaa

SEQ ID NO: 289682 - DNA, 25 bp, probe
tagcaggtgaactcgaagcccacaa

SEQ ID NO: 289683 - DNA, 25 bp, probe
tagctgggataacaggcgcccacca

SEQ ID NO: 289684 - DNA, 25 bp, probe
tagctgccaacagctaaagccccca

SEQ ID NO: 289685 - DNA, 25 bp, probe
tacgccaagccactaagcgtgccac

SEQ ID NO: 289686 - DNA, 25 bp, probe
tacgccaagccactaagcgtgccac

SEQ ID NO: 289687 - DNA, 25 bp, probe
taccgacagtgactaagggcagcat

SEQ ID NO: 289688 - DNA, 25 bp, probe
tacgcccagggaaagcggcgttatg

SEQ ID NO: 289689 - DNA, 25 bp, probe
tacccacaggaagtccagccagttt

SEQ ID NO: 289690 - DNA, 25 bp, probe
taccacaagtgctttcccaagaatt

SEQ ID NO: 289691 - DNA, 25 bp, probe
tagagccaagtgtcttttaaacatt

SEQ ID NO: 289692 - DNA, 25 bp, probe
tagcagtaaaacgctgtaaactgta

SEQ ID NO: 289693 - DNA, 25 bp, probe
tagcgttcgaacgcactgatttcga

SEQ ID NO: 289694 - DNA, 25 bp, probe
taggcctccgaagactgtttgagac

SEQ ID NO: 289695 - DNA, 25 bp, probe
tatggccccatgaagaactacctga

SEQ ID NO: 289696 - DNA, 25 bp, probe
tatcgcccctgagatcctacagggc

SEQ ID NO: 289697 - DNA, 25 bp, probe
ttccctccttggagaacagggccct

SEQ ID NO: 289698 - DNA, 25 bp, probe
tacccttctgtgctagaaaggtgcc

SEQ ID NO: 289699 - DNA, 25 bp, probe
tagtccaccgtgacattaaaggtgc

SEQ ID NO: 289700 - DNA, 25 bp, probe
tagaccagtctgattttgaagggtt

SEQ ID NO: 289701 - DNA, 25 bp, probe
tagcctcagaccgtccttgaagagg

SEQ ID NO: 289702 - DNA, 25 bp, probe
tagcgcccaagctcagcttagaagt

SEQ ID NO: 289703 - DNA, 25 bp, probe
taccagccaatcccagtcaaagaag

SEQ ID NO: 289704 - DNA, 25 bp, probe
tacctccacaccaagtgcaagatca

SEQ ID NO: 289705 - DNA, 25 bp, probe
tacctactgctccaagtcagatgtg

SEQ ID NO: 289706 - DNA, 25 bp, probe
tagcctactcttctgtcagtggctt

SEQ ID NO: 289707 - DNA, 25 bp, probe
tacctagcttggcctagagtggcaa

SEQ ID NO: 289708 - DNA, 25 bp, probe
taccatactttgaattagtggcaga

SEQ ID NO: 289709 - DNA, 25 bp, probe
tacctacttggtttcagtgaatgtt

SEQ ID NO: 289710 - DNA, 25 bp, probe
tacctactttacccatgatgaaatt

SEQ ID NO: 289711 - DNA, 25 bp, probe
tacctcatctctaacctgctaaagt

SEQ ID NO: 289712 - DNA, 25 bp, probe
tacccagtctcatctgtgtacacag

SEQ ID NO: 289713 - DNA, 25 bp, probe
tagcctatgtacatctttaccagcc

SEQ ID NO: 289714 - DNA, 25 bp, probe
tagcctatgtacatctttaccagcc

SEQ ID NO: 289715 - DNA, 25 bp, probe
tacctgtctgacacaatatcaccag

SEQ ID NO: 289716 - DNA, 25 bp, probe
taccttctgacagccatggaatatg

SEQ ID NO: 289717 - DNA, 25 bp, probe
taccccagaccttcatgagacagtg

SEQ ID NO: 289718 - DNA, 25 bp, probe
taccccagaccttcatgagacagtg

SEQ ID NO: 289719 - DNA, 25 bp, probe
taccccagaccttcatgagacagtg

SEQ ID NO: 289720 - DNA, 25 bp, probe
tagcagcctaatcttcttcactgtg

SEQ ID NO: 289721 - DNA, 25 bp, probe
tagccgctacatctgttacttttgt

SEQ ID NO: 289722 - DNA, 25 bp, probe
taccagtaatccattcactctttct

SEQ ID NO: 289723 - DNA, 25 bp, probe
taccaggataaaaacacttctccct

SEQ ID NO: 289724 - DNA, 25 bp, probe
taccaggataaaaacacttctccct

SEQ ID NO: 289725 - DNA, 25 bp, probe
tacctggaggaaaatcacttcatcc

SEQ ID NO: 289726 - DNA, 25 bp, probe
tagactgttgggacagccattttcc

SEQ ID NO: 289727 - DNA, 25 bp, probe
tacctcctggatatgcagcgtttcc

SEQ ID NO: 289728 - DNA, 25 bp, probe
taccttcagctattatgccaggttc

SEQ ID NO: 289729 - DNA, 25 bp, probe
tacctttccatctagcaagttccca

SEQ ID NO: 289730 - DNA, 25 bp, probe
tacctttccatctagcaagttccca

SEQ ID NO: 289731 - DNA, 25 bp, probe
taccatttattacatcgttcatccg

SEQ ID NO: 289732 - DNA, 25 bp, probe
taccatttcatatccattgaagccg

SEQ ID NO: 289733 - DNA, 25 bp, probe
tacctgtacactgacttgagaccag

SEQ ID NO: 289734 - DNA, 25 bp, probe
tagcgtggacatagccctgtgatac

SEQ ID NO: 289735 - DNA, 25 bp, probe
taccaggcagcgaagctctcttaca

SEQ ID NO: 289736 - DNA, 25 bp, probe
taccaggcagcgaagctctcttaca

SEQ ID NO: 289737 - DNA, 25 bp, probe
taccaggcagagaactgaagtactg

SEQ ID NO: 289738 - DNA, 25 bp, probe
taccagcagctgaaaccaattggct

SEQ ID NO: 289739 - DNA, 25 bp, probe
tacctgcacgatcatcacctggtgc

SEQ ID NO: 289740 - DNA, 25 bp, probe
tacctgcacgatcatcacctggtgc

SEQ ID NO: 289741 - DNA, 25 bp, probe
taccgctttgcaatcactgtggcgc

SEQ ID NO: 289742 - DNA, 25 bp, probe
taccagctctccaacacggaggcaa

SEQ ID NO: 289743 - DNA, 25 bp, probe
tagcctcttctcccaggggagctac

SEQ ID NO: 289744 - DNA, 25 bp, probe
taccgctgtcgggagtgcgggctgt

SEQ ID NO: 289745 - DNA, 25 bp, probe
taccgagaggagtaccgtggcttcc

SEQ ID NO: 289746 - DNA, 25 bp, probe
taccgagaggagtaccgtggcttcc

SEQ ID NO: 289747 - DNA, 25 bp, probe
aaggctccagggatacagagttgtc

SEQ ID NO: 289748 - DNA, 25 bp, probe
tacctggaggagcagcgcgttgtgc

SEQ ID NO: 289749 - DNA, 25 bp, probe
taccagcgagggccgcggagatggg

SEQ ID NO: 289750 - DNA, 25 bp, probe
tagccatggggctgggcgatcagcg

SEQ ID NO: 289751 - DNA, 25 bp, probe
tagcgctggaggcgctgcacgagca

SEQ ID NO: 289752 - DNA, 25 bp, probe
tagcgctggaggcgctgcacgagca

SEQ ID NO: 289753 - DNA, 25 bp, probe
tagattgagatacagctccagacgc

SEQ ID NO: 289754 - DNA, 25 bp, probe
tagattaagagtcaatctgcaagcc

SEQ ID NO: 289755 - DNA, 25 bp, probe
tagactcaggaagattgctgctcag

SEQ ID NO: 289756 - DNA, 25 bp, probe
tatgcctgcaggagtttctatagcg

SEQ ID NO: 289757 - DNA, 25 bp, probe
tagcctcgagtccgaggtatgacgc

SEQ ID NO: 289758 - DNA, 25 bp, probe
taccactgcattgggacgtctgcac

SEQ ID NO: 289759 - DNA, 25 bp, probe
taccccatggaccatgctgtctggc

SEQ ID NO: 289760 - DNA, 25 bp, probe
taccaccaggacgtgctcattgagt

SEQ ID NO: 289761 - DNA, 25 bp, probe
taccgcagggagtctgccatctgac

SEQ ID NO: 289762 - DNA, 25 bp, probe
taccgagcaaggtctgagctcttct

SEQ ID NO: 289763 - DNA, 25 bp, probe
tagctgggcatggtggcatgcgcct

SEQ ID NO: 289764 - DNA, 25 bp, probe
tagcagaagcaaatgtcatgcagca

SEQ ID NO: 289765 - DNA, 25 bp, probe
tagcaaatgctgtctccagctgctc

SEQ ID NO: 289766 - DNA, 25 bp, probe
tagcatctacgacaagcgctgcgac

SEQ ID NO: 289767 - DNA, 25 bp, probe
tacctcactgggtcaccatcgagat

SEQ ID NO: 289768 - DNA, 25 bp, probe
tagactcatgtgttttccacggtag

SEQ ID NO: 289769 - DNA, 25 bp, probe
tagacgagtttcttctcagcagtgc

SEQ ID NO: 289770 - DNA, 25 bp, probe
taccgtgttctactgcatcaaggtc

SEQ ID NO: 289771 - DNA, 25 bp, probe
tacctgttcattatcatcaaggtga

SEQ ID NO: 289772 - DNA, 25 bp, probe
tacctgtatctcccacattagttgt

SEQ ID NO: 289773 - DNA, 25 bp, probe
tacctgttcatcccacatgattgtg

SEQ ID NO: 289774 - DNA, 25 bp, probe
tacctgttcatcccacatgattgtg

SEQ ID NO: 289775 - DNA, 25 bp, probe
taccgcatttacggctgcattctgt

SEQ ID NO: 289776 - DNA, 25 bp, probe
taccagctcttactctgggatgtgg

SEQ ID NO: 289777 - DNA, 25 bp, probe
tagctactcagtagtcttaggtggg

SEQ ID NO: 289778 - DNA, 25 bp, probe
tagcgacgcgctggcgttacagcgc

SEQ ID NO: 289779 - DNA, 25 bp, probe
tagccgtctgctggagtatacacca

SEQ ID NO: 289780 - DNA, 25 bp, probe
tacctggtgtgccagcgaaaccaaa

SEQ ID NO: 289781 - DNA, 25 bp, probe
tacctggtgtgccagcgaaaccaaa

SEQ ID NO: 289782 - DNA, 25 bp, probe
tacctggcctgccaggagggccacc

SEQ ID NO: 289783 - DNA, 25 bp, probe
taccaggcggcactggagtacctcg

SEQ ID NO: 289784 - DNA, 25 bp, probe
taccagtgctggtttaaacattcag

SEQ ID NO: 289785 - DNA, 25 bp, probe
taccagcagccgtttgaggacttcc

SEQ ID NO: 289786 - DNA, 25 bp, probe
tatgccagccgtttagggaaatctt

SEQ ID NO: 289787 - DNA, 25 bp, probe
tagctgacctgtttttggtccactt

SEQ ID NO: 289788 - DNA, 25 bp, probe
tagctgacctgtttttggtccactt

SEQ ID NO: 289789 - DNA, 25 bp, probe
taggacactgtatattgcaaattgc

SEQ ID NO: 289790 - DNA, 25 bp, probe
tagctgcttctatgtttcatagttg

SEQ ID NO: 289791 - DNA, 25 bp, probe
tagccatacatatcattgcatgaac

SEQ ID NO: 289792 - DNA, 25 bp, probe
taccatagcacagcactgctaaata

SEQ ID NO: 289793 - DNA, 25 bp, probe
tagcacgtgccagtcactgttctaa

SEQ ID NO: 289794 - DNA, 25 bp, probe
tagcagtggcgattcaggttctctt

SEQ ID NO: 289795 - DNA, 25 bp, probe
tagctgtggtgctgactgtctttgc

SEQ ID NO: 289796 - DNA, 25 bp, probe
taggtggtgccctgattgttggcat

SEQ ID NO: 289797 - DNA, 25 bp, probe
tagtgggtcgtcttgtttctagcaa

SEQ ID NO: 289798 - DNA, 25 bp, probe
tagtgggtcgtcttgtttctagcaa

SEQ ID NO: 289799 - DNA, 25 bp, probe
tatggggtccatttttgcacttgta

SEQ ID NO: 289800 - DNA, 25 bp, probe
ccaggtctgtactcctgttgtcttt

SEQ ID NO: 289801 - DNA, 25 bp, probe
tatgggtactgcggaaattcttgtg

SEQ ID NO: 289802 - DNA, 25 bp, probe
tacctgaacgccaagaagtttgtgc

SEQ ID NO: 289803 - DNA, 25 bp, probe
tagctctgttggcaagggtctgggt

SEQ ID NO: 289804 - DNA, 25 bp, probe
tagccttctgtgtggggatttcatg

SEQ ID NO: 289805 - DNA, 25 bp, probe
tagctcttaagtaggggtattttct

SEQ ID NO: 289806 - DNA, 25 bp, probe
tacctactggttgatgtgttttttc

SEQ ID NO: 289807 - DNA, 25 bp, probe
tacctagtctttgaatttgttgacc

SEQ ID NO: 289808 - DNA, 25 bp, probe
taccatatgttgctccagaacttct

SEQ ID NO: 289809 - DNA, 25 bp, probe
taccattcttcacccagagatcgtt

SEQ ID NO: 289810 - DNA, 25 bp, probe
tagcaattcttcagctgcaagagga

SEQ ID NO: 289811 - DNA, 25 bp, probe
tagaatgttcacaccacgatctgga

SEQ ID NO: 289812 - DNA, 25 bp, probe
ttggataacctgtaccgactggaag

SEQ ID NO: 289813 - DNA, 25 bp, probe
ttccaaaccttagcaggcgctttca

SEQ ID NO: 289814 - DNA, 25 bp, probe
taccaagtccttaggagtcttaaca

SEQ ID NO: 289815 - DNA, 25 bp, probe
taccaggctggcatgaggaattctg

SEQ ID NO: 289816 - DNA, 25 bp, probe
taccagtgtgatgtcaggccattgt

SEQ ID NO: 289817 - DNA, 25 bp, probe
tagccgggagggctccattgaggag

SEQ ID NO: 289818 - DNA, 25 bp, probe
tagccacggcagtgtttttggtctg

SEQ ID NO: 289819 - DNA, 25 bp, probe
taccacgaagctaccttttgggatg

SEQ ID NO: 289820 - DNA, 25 bp, probe
taccacgaagctaccttttgggatg

SEQ ID NO: 289821 - DNA, 25 bp, probe
taccacgtggtgaacctggctgagg

SEQ ID NO: 289822 - DNA, 25 bp, probe
taccacgtggtgaacctggctgagg

SEQ ID NO: 289823 - DNA, 25 bp, probe
tagcaatttgtacatcctggcgggt

SEQ ID NO: 289824 - DNA, 25 bp, probe
tagcaatttgtacatcctggcgggt

SEQ ID NO: 289825 - DNA, 25 bp, probe
tagaatctggtgcttcctgaccaaa

SEQ ID NO: 289826 - DNA, 25 bp, probe
tagaattggtttgctctgatcattg

SEQ ID NO: 289827 - DNA, 25 bp, probe
tagacactggcattatccctttagg

SEQ ID NO: 289828 - DNA, 25 bp, probe
tagcaccaggcatagccacttttgc

SEQ ID NO: 289829 - DNA, 25 bp, probe
tagatccaggtctccaattcatggt

SEQ ID NO: 289830 - DNA, 25 bp, probe
tagctcaaggtctcctgttcgaact

SEQ ID NO: 289831 - DNA, 25 bp, probe
tagctcaaggtctcctgttcgaact

SEQ ID NO: 289832 - DNA, 25 bp, probe
tagctcaaggtctcctgttcgaact

SEQ ID NO: 289833 - DNA, 25 bp, probe
taccaatgggcattgctgtgttcag

SEQ ID NO: 289834 - DNA, 25 bp, probe
tttgtcttgggaggcaccgtactca

SEQ ID NO: 289835 - DNA, 25 bp, probe
tttgtcttgggaggcaccgtactca

SEQ ID NO: 289836 - DNA, 25 bp, probe
tagtacatagtgggccccctacata

SEQ ID NO: 289837 - DNA, 25 bp, probe
tagaatcttgtctgtcactcactac

SEQ ID NO: 289838 - DNA, 25 bp, probe
tagaatcttgtctgtcactcactac

SEQ ID NO: 289839 - DNA, 25 bp, probe
tagaatccataatgctccctacatc

SEQ ID NO: 289840 - DNA, 25 bp, probe
tagaatccataatgctccctacatc

SEQ ID NO: 289841 - DNA, 25 bp, probe
tagactgcagtggacagtccccacc

SEQ ID NO: 289842 - DNA, 25 bp, probe
taggtggtacatgtgtcccacacct

SEQ ID NO: 289843 - DNA, 25 bp, probe
taggatggaagtcttgtcccgctat

SEQ ID NO: 289844 - DNA, 25 bp, probe
taggatggaagtcttgtcccgctat

SEQ ID NO: 289845 - DNA, 25 bp, probe
taggtacagagacgtcagtcccttt

SEQ ID NO: 289846 - DNA, 25 bp, probe
tagttaccaatgctgcagtcctgca

SEQ ID NO: 289847 - DNA, 25 bp, probe
tagctctgagccagttcagtacctg

SEQ ID NO: 289848 - DNA, 25 bp, probe
tagctctgagccagttcagtacctg

SEQ ID NO: 289849 - DNA, 25 bp, probe
tagctctgagccagttcagtacctg

SEQ ID NO: 289850 - DNA, 25 bp, probe
taccatggcctggtactgaatcctg

SEQ ID NO: 289851 - DNA, 25 bp, probe
tagctattcgtcctaaaacactgga

SEQ ID NO: 289852 - DNA, 25 bp, probe
tatgctaatttggggaaacctagag

SEQ ID NO: 289853 - DNA, 25 bp, probe
tatgctaatttggggaaacctagag

SEQ ID NO: 289854 - DNA, 25 bp, probe
tagctaggtcatttggaaactgtaa

SEQ ID NO: 289855 - DNA, 25 bp, probe
tagccaggacacatttccactataa

SEQ ID NO: 289856 - DNA, 25 bp, probe
tatgccaattacacttacaataagg

SEQ ID NO: 289857 - DNA, 25 bp, probe
tagagacctgccccttaaataagag

SEQ ID NO: 289858 - DNA, 25 bp, probe
tagaacctggagggctagaacctgg

SEQ ID NO: 289859 - DNA, 25 bp, probe
tagccacctaggggaggaggccgtg

SEQ ID NO: 289860 - DNA, 25 bp, probe
tagccacctaggggaggaggccgtg

SEQ ID NO: 289861 - DNA, 25 bp, probe
taccaccgggaaacggatcacgagg

SEQ ID NO: 289862 - DNA, 25 bp, probe
taccagccaagtacacacgatgata

SEQ ID NO: 289863 - DNA, 25 bp, probe
taccagcccctcatacattgataaa

SEQ ID NO: 289864 - DNA, 25 bp, probe
taccgtcacccttatcagcaaagac

SEQ ID NO: 289865 - DNA, 25 bp, probe
taccttcagcctaaggcacaaggat

SEQ ID NO: 289866 - DNA, 25 bp, probe
tagccactagcagaacaaaaggcaa

SEQ ID NO: 289867 - DNA, 25 bp, probe
tagacagcctgcgagacctaagagg

SEQ ID NO: 289868 - DNA, 25 bp, probe
tagagagcctgcttcaagattaagg

SEQ ID NO: 289869 - DNA, 25 bp, probe
tagaatctcctggaatgcttaatgg

SEQ ID NO: 289870 - DNA, 25 bp, probe
tagaagcccttgttgctgtagatgt

SEQ ID NO: 289871 - DNA, 25 bp, probe
tagaatgaatcgttttgctctgatg

SEQ ID NO: 289872 - DNA, 25 bp, probe
tagaagagtctattgtctccttggt

SEQ ID NO: 289873 - DNA, 25 bp, probe
tagtatttcaaatttccttccttgt

SEQ ID NO: 289874 - DNA, 25 bp, probe
agcctctatttatttattagctttt

SEQ ID NO: 289875 - DNA, 25 bp, probe
tagaatattaagttttcctctgtgc

SEQ ID NO: 289876 - DNA, 25 bp, probe
tagctaatgtgtggtttctccttcc

SEQ ID NO: 289877 - DNA, 25 bp, probe
tagccactgctagatatttatttcc

SEQ ID NO: 289878 - DNA, 25 bp, probe
taccactatagtttcctttgtttca

SEQ ID NO: 289879 - DNA, 25 bp, probe
taccaagatagtttcctgctggcct

SEQ ID NO: 289880 - DNA, 25 bp, probe
tagccacagtcagaatccgtgagtt

SEQ ID NO: 289881 - DNA, 25 bp, probe
tagaagagtcaggaagggaaagcca

SEQ ID NO: 289882 - DNA, 25 bp, probe
ttgccgagtccgacggtgagacgcc

SEQ ID NO: 289883 - DNA, 25 bp, probe
ttcaggagtccgaggtagccttcaa

SEQ ID NO: 289884 - DNA, 25 bp, probe
tacctggtcaccagggcagctttca

SEQ ID NO: 289885 - DNA, 25 bp, probe
tagttgcgtcccagggaccaagaga

SEQ ID NO: 289886 - DNA, 25 bp, probe
tagttcttaagttgttagccaagta

SEQ ID NO: 289887 - DNA, 25 bp, probe
tagttttaaggacttcatccctcca

SEQ ID NO: 289888 - DNA, 25 bp, probe
tagcaatttatctgaattctctccc

SEQ ID NO: 289889 - DNA, 25 bp, probe
tagaattctcaggggacatctccca

SEQ ID NO: 289890 - DNA, 25 bp, probe
tagaattgcacatagttctgcccaa

SEQ ID NO: 289891 - DNA, 25 bp, probe
tagcttgtccaaggtctcatgacca

SEQ ID NO: 289892 - DNA, 25 bp, probe
tagtttccagatggctctaacctca

SEQ ID NO: 289893 - DNA, 25 bp, probe
tagcaatgtaagtgcctataaccat

SEQ ID NO: 289894 - DNA, 25 bp, probe
tagatttaattccctcaataacacc

SEQ ID NO: 289895 - DNA, 25 bp, probe
tagtttcttactgctcatggattac

SEQ ID NO: 289896 - DNA, 25 bp, probe
tagttcccaaactcatggaagtctg

SEQ ID NO: 289897 - DNA, 25 bp, probe
tagttcccgacgtctatgagaagga

SEQ ID NO: 289898 - DNA, 25 bp, probe
tagcatatcctttggctttggaagc

SEQ ID NO: 289899 - DNA, 25 bp, probe
tagcatatcctttggctttggaagc

SEQ ID NO: 289900 - DNA, 25 bp, probe
tagatgtctgcgaggccatggaata

SEQ ID NO: 289901 - DNA, 25 bp, probe
tagctgttgcgtggtgcctgagaaa

SEQ ID NO: 289902 - DNA, 25 bp, probe
tagctttgccatgtcatctggaata

SEQ ID NO: 289903 - DNA, 25 bp, probe
taccatgtccagatactgtctattt

SEQ ID NO: 289904 - DNA, 25 bp, probe
tagcctgttcagacatccgattcaa

SEQ ID NO: 289905 - DNA, 25 bp, probe
tagcttttgatgtctccaagtagtc

SEQ ID NO: 289906 - DNA, 25 bp, probe
tagcttctaggatccaagtttcctt

SEQ ID NO: 289907 - DNA, 25 bp, probe
tagcatcccatgtcaaaaacttgga

SEQ ID NO: 289908 - DNA, 25 bp, probe
tagcatcccatgtcaaaaacttgga

SEQ ID NO: 289909 - DNA, 25 bp, probe
tagctcccattggctgaagacactg

SEQ ID NO: 289910 - DNA, 25 bp, probe
tagccctttagttatgagcctgtgg

SEQ ID NO: 289911 - DNA, 25 bp, probe
tagcctctcttacaggaattgtgaa

SEQ ID NO: 289912 - DNA, 25 bp, probe
tagcctccattcatggtgcacttta

SEQ ID NO: 289913 - DNA, 25 bp, probe
tagccatctttcaaattcactttta

SEQ ID NO: 289914 - DNA, 25 bp, probe
tacctttattaattagcttctagaa

SEQ ID NO: 289915 - DNA, 25 bp, probe
tagccttcaaaaatattgcttccaa

SEQ ID NO: 289916 - DNA, 25 bp, probe
tagccttcaaaaatattgcttccaa

SEQ ID NO: 289917 - DNA, 25 bp, probe
tagctttaaaatatatctggaactt

SEQ ID NO: 289918 - DNA, 25 bp, probe
tagctttaaaaccacagctgggcag

SEQ ID NO: 289919 - DNA, 25 bp, probe
tagctttaagactacacaggttgtt

SEQ ID NO: 289920 - DNA, 25 bp, probe
taccttaagcatttcccagctgtgt

SEQ ID NO: 289921 - DNA, 25 bp, probe
tacctcatgaagtaccacgccatgt

SEQ ID NO: 289922 - DNA, 25 bp, probe
tacctagatatctgctactcacatt

SEQ ID NO: 289923 - DNA, 25 bp, probe
taccaagcagatcactgtcgccatc

SEQ ID NO: 289924 - DNA, 25 bp, probe
tagatcaggagaaactcgggcactc

SEQ ID NO: 289925 - DNA, 25 bp, probe
tagagggccacaagctctggggcca

SEQ ID NO: 289926 - DNA, 25 bp, probe
tagatggaggaagcgctgctgggcg

SEQ ID NO: 289927 - DNA, 25 bp, probe
tagagagcgaaggccttgccagggt

SEQ ID NO: 289928 - DNA, 25 bp, probe
tagacagatgacggctgctcgaaga

SEQ ID NO: 289929 - DNA, 25 bp, probe
tagagatgatgcctccattcctaga

SEQ ID NO: 289930 - DNA, 25 bp, probe
tagagatgatgcctccattcctaga

SEQ ID NO: 289931 - DNA, 25 bp, probe
tagcagagcagctccctcgctgcga

SEQ ID NO: 289932 - DNA, 25 bp, probe
tagcaatcactttaccagctgcata

SEQ ID NO: 289933 - DNA, 25 bp, probe
tagccacacagggaccactgtccca

SEQ ID NO: 289934 - DNA, 25 bp, probe
taccatcactggccccagtttcaaa

SEQ ID NO: 289935 - DNA, 25 bp, probe
taccacacggtggctcagatgttct

SEQ ID NO: 289936 - DNA, 25 bp, probe
tacctccagggatcagctgtgtgtg

SEQ ID NO: 289937 - DNA, 25 bp, probe
tagctccatagggaagcctgtgtct

SEQ ID NO: 289938 - DNA, 25 bp, probe
tagccaatgtgggagcagcggtttg

SEQ ID NO: 289939 - DNA, 25 bp, probe
tagtacaccatggagcacggtttaa

SEQ ID NO: 289940 - DNA, 25 bp, probe
tagaaacagactgcctgaattgaga

SEQ ID NO: 289941 - DNA, 25 bp, probe
tagctgagggcatggcctacatgga

SEQ ID NO: 289942 - DNA, 25 bp, probe
tagtagcggatctcactcagccgca

SEQ ID NO: 289943 - DNA, 25 bp, probe
tagacacaggtcactgccaagcatc

SEQ ID NO: 289944 - DNA, 25 bp, probe
tagaacaggtcggtggccacacaat

SEQ ID NO: 289945 - DNA, 25 bp, probe
tagaacaggtcggtggccacacaat

SEQ ID NO: 289946 - DNA, 25 bp, probe
tagactagtgccgtgggagtacctg

SEQ ID NO: 289947 - DNA, 25 bp, probe
tatgacaaggacgggaacctccggc

SEQ ID NO: 289948 - DNA, 25 bp, probe
tatgacaaggacgggaacctccggc

SEQ ID NO: 289949 - DNA, 25 bp, probe
tagacaagaacatacataccccggt

SEQ ID NO: 289950 - DNA, 25 bp, probe
tagggaagaaaactatcctgcgggt

SEQ ID NO: 289951 - DNA, 25 bp, probe
taggtaagaaagtctcaggctctga

SEQ ID NO: 289952 - DNA, 25 bp, probe
tagagataaacggcacggcgctttt

SEQ ID NO: 289953 - DNA, 25 bp, probe
tagagataaacggcacggcgctttt

SEQ ID NO: 289954 - DNA, 25 bp, probe
tagagaaaaccgtccaggccagtta

SEQ ID NO: 289955 - DNA, 25 bp, probe
tagggcaaatcaccctaggccactt

SEQ ID NO: 289956 - DNA, 25 bp, probe
tagtacagctaacccttgaacagtg

SEQ ID NO: 289957 - DNA, 25 bp, probe
tagttattaactacactgaacagtt

SEQ ID NO: 289958 - DNA, 25 bp, probe
tagttttaaaactgactgtgaattt

SEQ ID NO: 289959 - DNA, 25 bp, probe
tagcttttgtttacaccgtggaatt

SEQ ID NO: 289960 - DNA, 25 bp, probe
tagcttttgtttacaccgtggaatt

SEQ ID NO: 289961 - DNA, 25 bp, probe
tagccgtctgttatgcctttgtatt

SEQ ID NO: 289962 - DNA, 25 bp, probe
tagcctgtggcctttgcaatttgtt

SEQ ID NO: 289963 - DNA, 25 bp, probe
tagttggagtctctgactgtttaaa

SEQ ID NO: 289964 - DNA, 25 bp, probe
tagcatttagtccaatgtcttttta

SEQ ID NO: 289965 - DNA, 25 bp, probe
tagcatttattaacaggtactctaa

SEQ ID NO: 289966 - DNA, 25 bp, probe
tagaatatgacttccaggtggctgt

SEQ ID NO: 289967 - DNA, 25 bp, probe
tagcaatatgacattcttggtgaca

SEQ ID NO: 289968 - DNA, 25 bp, probe
taccattgccttggcttctggacac

SEQ ID NO: 289969 - DNA, 25 bp, probe
tagccggactacgtgggtgtactcc

SEQ ID NO: 289970 - DNA, 25 bp, probe
tagccggactcagctgcgaggagat

SEQ ID NO: 289971 - DNA, 25 bp, probe
taggacgactcagtatccgagagct

SEQ ID NO: 289972 - DNA, 25 bp, probe
tagattctgaccatgactcataagc

SEQ ID NO: 289973 - DNA, 25 bp, probe
tagatagatagccctagccctagat

SEQ ID NO: 289974 - DNA, 25 bp, probe
tagcatcacaaactcgaaccaaagt

SEQ ID NO: 289975 - DNA, 25 bp, probe
tagccacacatactccaacgaagtg

SEQ ID NO: 289976 - DNA, 25 bp, probe
tagccacacatactccaacgaagtg

SEQ ID NO: 289977 - DNA, 25 bp, probe
tagaagtcaaagtcgaccaaatgat

SEQ ID NO: 289978 - DNA, 25 bp, probe
tagaatgtcattcatccaacaaaca

SEQ ID NO: 289979 - DNA, 25 bp, probe
tagaatgtcattcatccaacaaaca

SEQ ID NO: 289980 - DNA, 25 bp, probe
tagagatgttgtggtcgatttacaa

SEQ ID NO: 289981 - DNA, 25 bp, probe
tagaatttcccatgcatttactaga

SEQ ID NO: 289982 - DNA, 25 bp, probe
taggaattcctctgttttatggatc

SEQ ID NO: 289983 - DNA, 25 bp, probe
taggtaactcttcattttaggaaca

SEQ ID NO: 289984 - DNA, 25 bp, probe
tagtgttaatgatcctgtcttaggg

SEQ ID NO: 289985 - DNA, 25 bp, probe
tagctctaagagtgacgtttacagt

SEQ ID NO: 289986 - DNA, 25 bp, probe
tagctctaagagtgacgtttacagt

SEQ ID NO: 289987 - DNA, 25 bp, probe
tagactcaggagaaacgaacataga

SEQ ID NO: 289988 - DNA, 25 bp, probe
tagagctggagacctacaaactgaa

SEQ ID NO: 289989 - DNA, 25 bp, probe
tagattgctggctactaaaaataca

SEQ ID NO: 289990 - DNA, 25 bp, probe
tagatttctcatttgccaataataa

SEQ ID NO: 289991 - DNA, 25 bp, probe
tagctcattttctgccgatgaagaa

SEQ ID NO: 289992 - DNA, 25 bp, probe
tagttctttcatctagatggagata

SEQ ID NO: 289993 - DNA, 25 bp, probe
tagcactcattttctataacagata

SEQ ID NO: 289994 - DNA, 25 bp, probe
tagcactcattttctataacagata

SEQ ID NO: 289995 - DNA, 25 bp, probe
tagcgctctggttgctctaagcata

SEQ ID NO: 289996 - DNA, 25 bp, probe
tagccacgcagatgccgattgcttt

SEQ ID NO: 289997 - DNA, 25 bp, probe
tagctactgtttgcaatgtcttatt

SEQ ID NO: 289998 - DNA, 25 bp, probe
tagcataatgtatccattacttagt

SEQ ID NO: 289999 - DNA, 25 bp, probe
tagcgattgtcaagccacaactcta

SEQ ID NO: 290000 - DNA, 25 bp, probe
tagcagggaataccacagtcattag

SEQ ID NO: 290001 - DNA, 25 bp, probe
tagcaggtgccaatccagcagtcat

SEQ ID NO: 290002 - DNA, 25 bp, probe
tagcagcccgcaactgcatggtgtc

SEQ ID NO: 290003 - DNA, 25 bp, probe
tagctgctcgaaactgcatgttgcg

SEQ ID NO: 290004 - DNA, 25 bp, probe
tagcgcgcaactgctggctgcgcgc

SEQ ID NO: 290005 - DNA, 25 bp, probe
tatctgccatactccctggcatagt

SEQ ID NO: 290006 - DNA, 25 bp, probe
tatctgccatactccctggcatagt

SEQ ID NO: 290007 - DNA, 25 bp, probe
tagctctctgactgctttggatagt

SEQ ID NO: 290008 - DNA, 25 bp, probe
tagctgctctactcctagggcagat

SEQ ID NO: 290009 - DNA, 25 bp, probe
tagctgctctactcctagggcagat

SEQ ID NO: 290010 - DNA, 25 bp, probe
tatgcctcgagctgcaacagcggca

SEQ ID NO: 290011 - DNA, 25 bp, probe
tagcctatgtctggcagatgagggc

SEQ ID NO: 290012 - DNA, 25 bp, probe
tagcctatgtgcatgcagcatctaa

SEQ ID NO: 290013 - DNA, 25 bp, probe
tagccctgtgatactgcatctcact

SEQ ID NO: 290014 - DNA, 25 bp, probe
tagcaactgtgctacacttgcacct

SEQ ID NO: 290015 - DNA, 25 bp, probe
tatgcaatcaattagcagcctcatg

SEQ ID NO: 290016 - DNA, 25 bp, probe
tagcaaccataactgccactgtgct

SEQ ID NO: 290017 - DNA, 25 bp, probe
tagcatcactaacctgacagttgtt

SEQ ID NO: 290018 - DNA, 25 bp, probe
tagccatctgaaactgacagacttt

SEQ ID NO: 290019 - DNA, 25 bp, probe
tatccctacaacaaattttgataac

SEQ ID NO: 290020 - DNA, 25 bp, probe
tatccctacaacaaattttgataac

SEQ ID NO: 290021 - DNA, 25 bp, probe
taccacataaacatcactttgtcta

SEQ ID NO: 290022 - DNA, 25 bp, probe
taccaatacactgctaagtagttca

SEQ ID NO: 290023 - DNA, 25 bp, probe
taccagtgctactctcaacgagttc

SEQ ID NO: 290024 - DNA, 25 bp, probe
ttggagtcatactgtaaacagtttt

SEQ ID NO: 290025 - DNA, 25 bp, probe
tataacttagaattaaatccctgtt

SEQ ID NO: 290026 - DNA, 25 bp, probe
ttaacttctagctaacaactactta

SEQ ID NO: 290027 - DNA, 25 bp, probe
ttgagagttcgataaaagccattaa

SEQ ID NO: 290028 - DNA, 25 bp, probe
ttggaacctgcaataaactcgctgt

SEQ ID NO: 290029 - DNA, 25 bp, probe
tagaatatcctcctaaatccgttgc

SEQ ID NO: 290030 - DNA, 25 bp, probe
tatactggcctcctatacacaaatt

SEQ ID NO: 290031 - DNA, 25 bp, probe
tagaggccagtggtttcaaaattta

SEQ ID NO: 290032 - DNA, 25 bp, probe
tagagacggggtttcaccgtgttag

SEQ ID NO: 290033 - DNA, 25 bp, probe
tagagacggggtttcgccatgttga

SEQ ID NO: 290034 - DNA, 25 bp, probe
taggacccagttttgattcagtgga

SEQ ID NO: 290035 - DNA, 25 bp, probe
taggacccagttttgattcagtgga

SEQ ID NO: 290036 - DNA, 25 bp, probe
tagtgaccaactctgtgttggtcgc

SEQ ID NO: 290037 - DNA, 25 bp, probe
tagatgacactgatggttttactcc

SEQ ID NO: 290038 - DNA, 25 bp, probe
taggaagcagtgtgggcctgaccct

SEQ ID NO: 290039 - DNA, 25 bp, probe
taggaagcagtgtgggcctgaccct

SEQ ID NO: 290040 - DNA, 25 bp, probe
tagtttgaggccgggcactgtctgg

SEQ ID NO: 290041 - DNA, 25 bp, probe
tagttggggcccagagagatgcatg

SEQ ID NO: 290042 - DNA, 25 bp, probe
tagatcggtggtcccgcatattctt

SEQ ID NO: 290043 - DNA, 25 bp, probe
tagacaagtggtcccgaatgttttt

SEQ ID NO: 290044 - DNA, 25 bp, probe
tagggcaggtgtctgcaaacttttt

SEQ ID NO: 290045 - DNA, 25 bp, probe
tagggtttgctctgacaatttttaa

SEQ ID NO: 290046 - DNA, 25 bp, probe
tagggtttgctctgacaatttttaa

SEQ ID NO: 290047 - DNA, 25 bp, probe
tagggctgggcctgaccaaaaatat

SEQ ID NO: 290048 - DNA, 25 bp, probe
tagaccaggcccagaatcgaatcca

SEQ ID NO: 290049 - DNA, 25 bp, probe
tagagccaggacacagaccttttca

SEQ ID NO: 290050 - DNA, 25 bp, probe
tagccgaggaagacacagcgccttc

SEQ ID NO: 290051 - DNA, 25 bp, probe
tagccgatggaaaatacctaattgt

SEQ ID NO: 290052 - DNA, 25 bp, probe
tagccagatgtagaatccctgttgt

SEQ ID NO: 290053 - DNA, 25 bp, probe
tagccagttactggtcatgcctgct

SEQ ID NO: 290054 - DNA, 25 bp, probe
tagcggttgagtgcgatggctgtga

SEQ ID NO: 290055 - DNA, 25 bp, probe
tagggttgggccctgaggcttgaag

SEQ ID NO: 290056 - DNA, 25 bp, probe
tagtggcttgagaatgccctggccg

SEQ ID NO: 290057 - DNA, 25 bp, probe
tagcttttgcaggccgactgagcag

SEQ ID NO: 290058 - DNA, 25 bp, probe
tagcagatttggttgcagaagagca

SEQ ID NO: 290059 - DNA, 25 bp, probe
tagactatgaggctgcgaaggcaga

SEQ ID NO: 290060 - DNA, 25 bp, probe
tagacttcattgactgtgtcagaga

SEQ ID NO: 290061 - DNA, 25 bp, probe
tagagctctcactcactgataatgc

SEQ ID NO: 290062 - DNA, 25 bp, probe
tagagcgtgacggcactgagtccta

SEQ ID NO: 290063 - DNA, 25 bp, probe
tagagaacgcagccctagagcctgc

SEQ ID NO: 290064 - DNA, 25 bp, probe
tagaaagtggctgtcagaccgagag

SEQ ID NO: 290065 - DNA, 25 bp, probe
taggaagtgccctcgagcactgaag

SEQ ID NO: 290066 - DNA, 25 bp, probe
taggacacgccccataggaagtagt

SEQ ID NO: 290067 - DNA, 25 bp, probe
taggaatcgtgcagggggagaaatc

SEQ ID NO: 290068 - DNA, 25 bp, probe
taggccacttggagggtagcagaac

SEQ ID NO: 290069 - DNA, 25 bp, probe
tagcggcctcggaaaagctggcaca

SEQ ID NO: 290070 - DNA, 25 bp, probe
taccacctggtgaagacgctgtaca

SEQ ID NO: 290071 - DNA, 25 bp, probe
tagccatcaatgtgaaggcgctgta

SEQ ID NO: 290072 - DNA, 25 bp, probe
tagccagcaatgttgtcaaggtctc

SEQ ID NO: 290073 - DNA, 25 bp, probe
tagcaggcaagaggatccaggtcct

SEQ ID NO: 290074 - DNA, 25 bp, probe
tagcgacgaggagtccatcctctcc

SEQ ID NO: 290075 - DNA, 25 bp, probe
taggaggaggcagggcctctccatg

SEQ ID NO: 290076 - DNA, 25 bp, probe
tagaggaaggctatcgtctgccaag

SEQ ID NO: 290077 - DNA, 25 bp, probe
tagccggaggggacgtggccaaggg

SEQ ID NO: 290078 - DNA, 25 bp, probe
tagatccgggggagaggcccaagtt

SEQ ID NO: 290079 - DNA, 25 bp, probe
tagtccgggggacttggggctgaga

SEQ ID NO: 290080 - DNA, 25 bp, probe
ttccccttcgggtctggggtgcaga

SEQ ID NO: 290081 - DNA, 25 bp, probe
ttccccttcgggtctggggtgcaga

SEQ ID NO: 290082 - DNA, 25 bp, probe
tagactccttcgtgatctggggatg

SEQ ID NO: 290083 - DNA, 25 bp, probe
tatgacatccgggccgacgtatgga

SEQ ID NO: 290084 - DNA, 25 bp, probe
tagagaactgtggccgttatctgga

SEQ ID NO: 290085 - DNA, 25 bp, probe
tagagatcatctagtcccatcaact

SEQ ID NO: 290086 - DNA, 25 bp, probe
tagacacatcaaatgccccgaattt

SEQ ID NO: 290087 - DNA, 25 bp, probe
taggcacatcatatttgctccaagt

SEQ ID NO: 290088 - DNA, 25 bp, probe
tagacatcatacacatttgccaaga

SEQ ID NO: 290089 - DNA, 25 bp, probe
tagaccatacatacgatcagcaaaa

SEQ ID NO: 290090 - DNA, 25 bp, probe
taggccatgttagcactgcaaaaaa

SEQ ID NO: 290091 - DNA, 25 bp, probe
tatgcctcagtggcaacctcatgaa

SEQ ID NO: 290092 - DNA, 25 bp, probe
tagttcattgcctgcacttactggt

SEQ ID NO: 290093 - DNA, 25 bp, probe
tagggtgctgagtgcctgatactgc

SEQ ID NO: 290094 - DNA, 25 bp, probe
tagaggctgtggtgcacgtgaacca

SEQ ID NO: 290095 - DNA, 25 bp, probe
tagcagacgtggggagcctgacccc

SEQ ID NO: 290096 - DNA, 25 bp, probe
tagcagacgtggggagcctgacccc

SEQ ID NO: 290097 - DNA, 25 bp, probe
tagcggttatgggatgggtcactgc

SEQ ID NO: 290098 - DNA, 25 bp, probe
ttcgcagctttacagggtcactaac

SEQ ID NO: 290099 - DNA, 25 bp, probe
ttgggttcatttggggtcaaagcca

SEQ ID NO: 290100 - DNA, 25 bp, probe
tagggcttcctttggtatcaaagta

SEQ ID NO: 290101 - DNA, 25 bp, probe
tagactgtcccgaaaatattaagta

SEQ ID NO: 290102 - DNA, 25 bp, probe
tagaggccaccgagaaacatgataa

SEQ ID NO: 290103 - DNA, 25 bp, probe
tagggtcactttgccattatgcaaa

SEQ ID NO: 290104 - DNA, 25 bp, probe
tagggtcactttgccattatgcaaa

SEQ ID NO: 290105 - DNA, 25 bp, probe
ttggtatactttgctttttctaggt

SEQ ID NO: 290106 - DNA, 25 bp, probe
tagactgataaacccttattttagt

SEQ ID NO: 290107 - DNA, 25 bp, probe
tagactgataaacccttattttagt

SEQ ID NO: 290108 - DNA, 25 bp, probe
tagtttgactatgccttacctttgt

SEQ ID NO: 290109 - DNA, 25 bp, probe
tagctaacctattcaaagacctttt

SEQ ID NO: 290110 - DNA, 25 bp, probe
tagaaacctttatccctgcttatct

SEQ ID NO: 290111 - DNA, 25 bp, probe
tagaaacctttatccctgcttatct

SEQ ID NO: 290112 - DNA, 25 bp, probe
tagacactttgattaagtcctattt

SEQ ID NO: 290113 - DNA, 25 bp, probe
ttaacttagtctactgggctacgta

SEQ ID NO: 290114 - DNA, 25 bp, probe
tttacttggacaacttcgtaggtag

SEQ ID NO: 290115 - DNA, 25 bp, probe
tattctcttggaattttcctaggta

SEQ ID NO: 290116 - DNA, 25 bp, probe
tattctcttggaattttcctaggta

SEQ ID NO: 290117 - DNA, 25 bp, probe
tattttaggcctctgtccatgtact

SEQ ID NO: 290118 - DNA, 25 bp, probe
tagttaaactctatgattatttctc

SEQ ID NO: 290119 - DNA, 25 bp, probe
tattaaatagtcactagtattgcta

SEQ ID NO: 290120 - DNA, 25 bp, probe
tagctaaaagtgtgttattctgctc

SEQ ID NO: 290121 - DNA, 25 bp, probe
taccaaccatgtaggattattcctg

SEQ ID NO: 290122 - DNA, 25 bp, probe
tataagccctatccgatgtacccgg

SEQ ID NO: 290123 - DNA, 25 bp, probe
tataagccctatccgatgtacccgg

SEQ ID NO: 290124 - DNA, 25 bp, probe
tataagctgtacccattgtacccgg

SEQ ID NO: 290125 - DNA, 25 bp, probe
tataagtagatcccatttagcccct

SEQ ID NO: 290126 - DNA, 25 bp, probe
tagtcagtaatttatcttaacctca

SEQ ID NO: 290127 - DNA, 25 bp, probe
tatgaagtatataccctttacccac

SEQ ID NO: 290128 - DNA, 25 bp, probe
tagaatgtgatcaatccagtttaca

SEQ ID NO: 290129 - DNA, 25 bp, probe
tagaagagtctttgctgttgctccc

SEQ ID NO: 290130 - DNA, 25 bp, probe
tagaaacagtgttgccatattctcc

SEQ ID NO: 290131 - DNA, 25 bp, probe
tagcgaagagctctgcaggctttcc

SEQ ID NO: 290132 - DNA, 25 bp, probe
tagcttaagctattggttcctaaaa

SEQ ID NO: 290133 - DNA, 25 bp, probe
tagcttaagctattggttcctaaaa

SEQ ID NO: 290134 - DNA, 25 bp, probe
tagctgtaacttggagctccactct

SEQ ID NO: 290135 - DNA, 25 bp, probe
taggaaaccaatagtccccatcagc

SEQ ID NO: 290136 - DNA, 25 bp, probe
tagcagtgacatctcattgtcccca

SEQ ID NO: 290137 - DNA, 25 bp, probe
tagcagtgacatctcattgtcccca

SEQ ID NO: 290138 - DNA, 25 bp, probe
tagctgatgctaagttggttctccc

SEQ ID NO: 290139 - DNA, 25 bp, probe
tagtagagacggggtttcaccgtgt

SEQ ID NO: 290140 - DNA, 25 bp, probe
tagcaaggacctcgttttcattttt

SEQ ID NO: 290141 - DNA, 25 bp, probe
tagaagaggcaattttacccttatt

SEQ ID NO: 290142 - DNA, 25 bp, probe
tagttgtggacttttccccattgac

SEQ ID NO: 290143 - DNA, 25 bp, probe
tatggttggcccacaccaaagtgat

SEQ ID NO: 290144 - DNA, 25 bp, probe
taggttgggcccagccagataatac

SEQ ID NO: 290145 - DNA, 25 bp, probe
tagtgggggccggcctagagaaggg

SEQ ID NO: 290146 - DNA, 25 bp, probe
tagaggaggccctgtctgaagcaga

SEQ ID NO: 290147 - DNA, 25 bp, probe
tagggagccaccagttatgatggga

SEQ ID NO: 290148 - DNA, 25 bp, probe
tagccgggctccagggagtggggag

SEQ ID NO: 290149 - DNA, 25 bp, probe
tagccgtggctagggctgacggggc

SEQ ID NO: 290150 - DNA, 25 bp, probe
tagccctagccattggtgcacagga

SEQ ID NO: 290151 - DNA, 25 bp, probe
tagagcttcacctgcggcaaagaaa

SEQ ID NO: 290152 - DNA, 25 bp, probe
ttagcttggcactggccgtcgtata

SEQ ID NO: 290153 - DNA, 25 bp, probe
ttcgtgttcaaaccacggagttcac

SEQ ID NO: 290154 - DNA, 25 bp, probe
ttcgtgttcaaaccacggagttcac

SEQ ID NO: 290155 - DNA, 25 bp, probe
tttgtgttcaaagcacggcgaggcc

SEQ ID NO: 290156 - DNA, 25 bp, probe
tatggtcttcaacaaggagggggaa

SEQ ID NO: 290157 - DNA, 25 bp, probe
taggtttcaacctgcgcattgggag

SEQ ID NO: 290158 - DNA, 25 bp, probe
tagggttttctcttggttgtagagt

SEQ ID NO: 290159 - DNA, 25 bp, probe
tagggatttttcgtctattgtaaga

SEQ ID NO: 290160 - DNA, 25 bp, probe
taggtattcgtttttctgttaagtg

SEQ ID NO: 290161 - DNA, 25 bp, probe
taggtattcgtttttctgttaagtg

SEQ ID NO: 290162 - DNA, 25 bp, probe
tagagtcattcatatttgtctttga

SEQ ID NO: 290163 - DNA, 25 bp, probe
tagagtcattcatatttgtctttga

SEQ ID NO: 290164 - DNA, 25 bp, probe
tagtcatacctaaatttttcagcac

SEQ ID NO: 290165 - DNA, 25 bp, probe
tagagcatgaccaactgtccttctc

SEQ ID NO: 290166 - DNA, 25 bp, probe
tagcagtgctacagctagcctgtgt

SEQ ID NO: 290167 - DNA, 25 bp, probe
tagcgtgcagacgatggagactgtg

SEQ ID NO: 290168 - DNA, 25 bp, probe
tagtgtgagcagcattgccctgagt

SEQ ID NO: 290169 - DNA, 25 bp, probe
tagggacagctatccccaggttatg

SEQ ID NO: 290170 - DNA, 25 bp, probe
tagggacagctatccccaggttatg

SEQ ID NO: 290171 - DNA, 25 bp, probe
tagggacaaatctcccatgtctttg

SEQ ID NO: 290172 - DNA, 25 bp, probe
tagggacacagatgaccgacctggt

SEQ ID NO: 290173 - DNA, 25 bp, probe
tagggtccagtggatgccacagccc

SEQ ID NO: 290174 - DNA, 25 bp, probe
tagggcttagagcatggacctcctg

SEQ ID NO: 290175 - DNA, 25 bp, probe
tagggcttagagcatggacctcctg

SEQ ID NO: 290176 - DNA, 25 bp, probe
tagaatcctagcctagaagccctct

SEQ ID NO: 290177 - DNA, 25 bp, probe
tagagtcactggcatgatgccctcg

SEQ ID NO: 290178 - DNA, 25 bp, probe
tagatgtccggggctgcacgcgcgc

SEQ ID NO: 290179 - DNA, 25 bp, probe
tatgatgactccaagtccaagccca

SEQ ID NO: 290180 - DNA, 25 bp, probe
tatgatgactccaagtccaagccca

SEQ ID NO: 290181 - DNA, 25 bp, probe
tagagacccagaattgagatccaaa

SEQ ID NO: 290182 - DNA, 25 bp, probe
taggcctcctgttctgagactaatg

SEQ ID NO: 290183 - DNA, 25 bp, probe
tagcactctcgagttctgagaccac

SEQ ID NO: 290184 - DNA, 25 bp, probe
tatgtttctgagcttggacaaaaag

SEQ ID NO: 290185 - DNA, 25 bp, probe
tagttggctggacattgataaaata

SEQ ID NO: 290186 - DNA, 25 bp, probe
tagttggggaaaatttcaccatcaa

SEQ ID NO: 290187 - DNA, 25 bp, probe
tagttcttggtatcttttcaatcaa

SEQ ID NO: 290188 - DNA, 25 bp, probe
tagcatagctctgtacatcttttaa

SEQ ID NO: 290189 - DNA, 25 bp, probe
tagctgtgcgctatcattcttttta

SEQ ID NO: 290190 - DNA, 25 bp, probe
tagctgttgctctggtatttcctat

SEQ ID NO: 290191 - DNA, 25 bp, probe
tagcagatggttatttttgcactga

SEQ ID NO: 290192 - DNA, 25 bp, probe
tagagtggttttgtcctgcagttca

SEQ ID NO: 290193 - DNA, 25 bp, probe
tagaaggatggttgtctcactgttt

SEQ ID NO: 290194 - DNA, 25 bp, probe
tatgtaggtttcttatcactttctc

SEQ ID NO: 290195 - DNA, 25 bp, probe
tttatggtcttctgttttgaagctc

SEQ ID NO: 290196 - DNA, 25 bp, probe
tattatggatctggaaggattctga

SEQ ID NO: 290197 - DNA, 25 bp, probe
taccaagcatgcatggaggatccaa

SEQ ID NO: 290198 - DNA, 25 bp, probe
tagcagacagctctggacagacaaa

SEQ ID NO: 290199 - DNA, 25 bp, probe
tagaagcgcatacgcatgactacat

SEQ ID NO: 290200 - DNA, 25 bp, probe
tagccatggctaagcagaaactacc

SEQ ID NO: 290201 - DNA, 25 bp, probe
tagccatggctaagcagaaactacc

SEQ ID NO: 290202 - DNA, 25 bp, probe
tagcaagcacatatggcaaccccca

SEQ ID NO: 290203 - DNA, 25 bp, probe
tagcaagcacatatggcaaccccca

SEQ ID NO: 290204 - DNA, 25 bp, probe
tagatgatcagtactggactcccct

SEQ ID NO: 290205 - DNA, 25 bp, probe
tagatgccatgcttcgcaaggactc

SEQ ID NO: 290206 - DNA, 25 bp, probe
tagagtctgttctacatgggcctgc

SEQ ID NO: 290207 - DNA, 25 bp, probe
tagaccgattcttcatgtggatttt

SEQ ID NO: 290208 - DNA, 25 bp, probe
tagatgttttccttgggatttattt

SEQ ID NO: 290209 - DNA, 25 bp, probe
tagctattcttcgtcgtgagatgtt

SEQ ID NO: 290210 - DNA, 25 bp, probe
tagcttttcttctactggcttgtaa

SEQ ID NO: 290211 - DNA, 25 bp, probe
tagcttatttttacagttatagaaa

SEQ ID NO: 290212 - DNA, 25 bp, probe
tagcttatttgaataaactacaaca

SEQ ID NO: 290213 - DNA, 25 bp, probe
tagctcactttaaaagattcatcaa

SEQ ID NO: 290214 - DNA, 25 bp, probe
tagtgactctgtaagtaagttaaat

SEQ ID NO: 290215 - DNA, 25 bp, probe
tagctcctcttcaagtaaacgccaa

SEQ ID NO: 290216 - DNA, 25 bp, probe
tatttatctgccaaaacaaggacaa

SEQ ID NO: 290217 - DNA, 25 bp, probe
tatgattcacatgctaaagccagga

SEQ ID NO: 290218 - DNA, 25 bp, probe
tagatcacatcgccgataaccagga

SEQ ID NO: 290219 - DNA, 25 bp, probe
ttatcgatggtccaaaccgggctgt

SEQ ID NO: 290220 - DNA, 25 bp, probe
tatgggatattcccaagccgacctt

SEQ ID NO: 290221 - DNA, 25 bp, probe
tagagtgaacttccacaccataccc

SEQ ID NO: 290222 - DNA, 25 bp, probe
tagagttcacagaactcctcacact

SEQ ID NO: 290223 - DNA, 25 bp, probe
tagctttcacaagtctcctagacac

SEQ ID NO: 290224 - DNA, 25 bp, probe
tagcagcccacaggtgatcctaaca

SEQ ID NO: 290225 - DNA, 25 bp, probe
tagagactgccagggtccatatgac

SEQ ID NO: 290226 - DNA, 25 bp, probe
tagagactgccagggtccatatgac

SEQ ID NO: 290227 - DNA, 25 bp, probe
tagaagctgccatcttgccatggcc

SEQ ID NO: 290228 - DNA, 25 bp, probe
tagaattcgcattttgccagctcag

SEQ ID NO: 290229 - DNA, 25 bp, probe
tagtattaatgcgttggcccacgta

SEQ ID NO: 290230 - DNA, 25 bp, probe
tagttataattgttggacctccttg

SEQ ID NO: 290231 - DNA, 25 bp, probe
tatgttgaagttctaaccccaggta

SEQ ID NO: 290232 - DNA, 25 bp, probe
tatgttgaagttctaaccccaggta

SEQ ID NO: 290233 - DNA, 25 bp, probe
tatggaatctttctaaccctagcta

SEQ ID NO: 290234 - DNA, 25 bp, probe
tagtaaattgcttctgagggtctga

SEQ ID NO: 290235 - DNA, 25 bp, probe
tagtaaattgcttctgagggtctga

SEQ ID NO: 290236 - DNA, 25 bp, probe
tagataaattccttgaagatgtcag

SEQ ID NO: 290237 - DNA, 25 bp, probe
tagaaaatcttcatggaattcacaa

SEQ ID NO: 290238 - DNA, 25 bp, probe
tagtagatcagcttactgccgttcc

SEQ ID NO: 290239 - DNA, 25 bp, probe
tagttaccttgtagactttgccata

SEQ ID NO: 290240 - DNA, 25 bp, probe
tagttaccttgtagactttgccata

SEQ ID NO: 290241 - DNA, 25 bp, probe
tagattcccttgaagatgtgtccca

SEQ ID NO: 290242 - DNA, 25 bp, probe
tagacaactcttcaggttccacatg

SEQ ID NO: 290243 - DNA, 25 bp, probe
tagtgtgagtttcaggtactcctga

SEQ ID NO: 290244 - DNA, 25 bp, probe
tagtctcgttttaggaatttcacag

SEQ ID NO: 290245 - DNA, 25 bp, probe
tagtctttatttatggtcgtgccct

SEQ ID NO: 290246 - DNA, 25 bp, probe
tagacttctcttacattttcgtcct

SEQ ID NO: 290247 - DNA, 25 bp, probe
tagacttcacttgtggtttgttgcc

SEQ ID NO: 290248 - DNA, 25 bp, probe
tagagcccaatttgtggtctacctt

SEQ ID NO: 290249 - DNA, 25 bp, probe
tagaccaagttgaggtctgttctgt

SEQ ID NO: 290250 - DNA, 25 bp, probe
tagcccgatggtaggattcagttct

SEQ ID NO: 290251 - DNA, 25 bp, probe
tagggctaggaacattctgctgtcg

SEQ ID NO: 290252 - DNA, 25 bp, probe
tagtggctgcatcatactcttggag

SEQ ID NO: 290253 - DNA, 25 bp, probe
tagctgctgctttcatattttggat

SEQ ID NO: 290254 - DNA, 25 bp, probe
tagtcagtttgaattttgacagcta

SEQ ID NO: 290255 - DNA, 25 bp, probe
tagtactgtgtactgtatagacagt

SEQ ID NO: 290256 - DNA, 25 bp, probe
tagagactgtgttcatgtgtaaaga

SEQ ID NO: 290257 - DNA, 25 bp, probe
tatgaatatggatctgccataagaa

SEQ ID NO: 290258 - DNA, 25 bp, probe
tagaatattcaactccatatggaaa

SEQ ID NO: 290259 - DNA, 25 bp, probe
tagaatattcaactccatatggaaa

SEQ ID NO: 290260 - DNA, 25 bp, probe
tagaatatttgcctaattgggaatt

SEQ ID NO: 290261 - DNA, 25 bp, probe
tagagaactgtacttactaggaatt

SEQ ID NO: 290262 - DNA, 25 bp, probe
tagaagcagtgtatggacaagccaa

SEQ ID NO: 290263 - DNA, 25 bp, probe
tagagaagtgtaacgtcaaggccaa

SEQ ID NO: 290264 - DNA, 25 bp, probe
tatagacgttaccgcttaaggcaaa

SEQ ID NO: 290265 - DNA, 25 bp, probe
tagaattgaaaatgcattagggaaa

SEQ ID NO: 290266 - DNA, 25 bp, probe
tagtttaaagtacctgtgggagaag

SEQ ID NO: 290267 - DNA, 25 bp, probe
tagtttaaagtacctgtgggagaag

SEQ ID NO: 290268 - DNA, 25 bp, probe
tagagttgaaattttctggtgggag

SEQ ID NO: 290269 - DNA, 25 bp, probe
tagagagctaagattatctggggaa

SEQ ID NO: 290270 - DNA, 25 bp, probe
tatgaacttggaattattggaaata

SEQ ID NO: 290271 - DNA, 25 bp, probe
tagaacatctcgacttattggaaag

SEQ ID NO: 290272 - DNA, 25 bp, probe
tagaacatctcgacttattggaaag

SEQ ID NO: 290273 - DNA, 25 bp, probe
tagaacatctcgacttattggaaag

SEQ ID NO: 290274 - DNA, 25 bp, probe
tagagaatccttgttcattgaagca

SEQ ID NO: 290275 - DNA, 25 bp, probe
tagagaatccttgttcattgaagca

SEQ ID NO: 290276 - DNA, 25 bp, probe
tagcgaaccctttatttgaacaatg

SEQ ID NO: 290277 - DNA, 25 bp, probe
taggtagcccttttcatttacaaat

SEQ ID NO: 290278 - DNA, 25 bp, probe
tatcgtgaacttgtcctcttaaaat

SEQ ID NO: 290279 - DNA, 25 bp, probe
tagcgagagatttttctgccttaaa

SEQ ID NO: 290280 - DNA, 25 bp, probe
tagagaaacaatttccctccaaagt

SEQ ID NO: 290281 - DNA, 25 bp, probe
tatgcaggaaaatagcaccccccgt

SEQ ID NO: 290282 - DNA, 25 bp, probe
tagagtgaagaggggagcacgtgcc

SEQ ID NO: 290283 - DNA, 25 bp, probe
tagggaaggagtcaacagtgtaact

SEQ ID NO: 290284 - DNA, 25 bp, probe
ttagggaaggagtcaacagtgtaac

SEQ ID NO: 290285 - DNA, 25 bp, probe
tttggggaggtgtacaaggggatcg

SEQ ID NO: 290286 - DNA, 25 bp, probe
tttgtgggcaggtatcaacattggg

SEQ ID NO: 290287 - DNA, 25 bp, probe
tatggtcgacggtccaaatttggaa

SEQ ID NO: 290288 - DNA, 25 bp, probe
tagtgaccacgggctacatcatatg

SEQ ID NO: 290289 - DNA, 25 bp, probe
tagtgaccacgggctacatcatatg

SEQ ID NO: 290290 - DNA, 25 bp, probe
tagtcccactggatggcaagggcac

SEQ ID NO: 290291 - DNA, 25 bp, probe
tagtcttccaggattcacggtgcac

SEQ ID NO: 290292 - DNA, 25 bp, probe
tagtcttccaggattcacggtgcac

SEQ ID NO: 290293 - DNA, 25 bp, probe
tagccccaaggaatatgcctgcctg

SEQ ID NO: 290294 - DNA, 25 bp, probe
tatcacctgcaacagaacgtccact

SEQ ID NO: 290295 - DNA, 25 bp, probe
ttctacctggcaaaacgtcctttgc

SEQ ID NO: 290296 - DNA, 25 bp, probe
ttctggaaacaaccctgtactttca

SEQ ID NO: 290297 - DNA, 25 bp, probe
ttcttttactgacccgaaccttcag

SEQ ID NO: 290298 - DNA, 25 bp, probe
ttcttttactgacccgaaccttcag

SEQ ID NO: 290299 - DNA, 25 bp, probe
tttcttattgaggccctgtaccttc

SEQ ID NO: 290300 - DNA, 25 bp, probe
tagtgttttgacctttctaggttca

SEQ ID NO: 290301 - DNA, 25 bp, probe
taggacccaaaatttctaggtgtgc

SEQ ID NO: 290302 - DNA, 25 bp, probe
tagtacccaaatcgtcttatattag

SEQ ID NO: 290303 - DNA, 25 bp, probe
tagtaataaacaccatttcatcatt

SEQ ID NO: 290304 - DNA, 25 bp, probe
tagattagaaaacccttacactttg

SEQ ID NO: 290305 - DNA, 25 bp, probe
tatgtctagattgacccttgatttt

SEQ ID NO: 290306 - DNA, 25 bp, probe
tagattagatgttttccttgggatt

SEQ ID NO: 290307 - DNA, 25 bp, probe
tatgattaattctgcccaatagggt

SEQ ID NO: 290308 - DNA, 25 bp, probe
tagttatgtcttaggaaattgtggt

SEQ ID NO: 290309 - DNA, 25 bp, probe
tagtctgcactttgtggtggcaatt

SEQ ID NO: 290310 - DNA, 25 bp, probe
tagctctcactttcaagaagcaata

SEQ ID NO: 290311 - DNA, 25 bp, probe
tagcccatcaactatagaagaagtg

SEQ ID NO: 290312 - DNA, 25 bp, probe
tagcccagatcccaagagattatgt

SEQ ID NO: 290313 - DNA, 25 bp, probe
tagcccggccaaggacactgatggg

SEQ ID NO: 290314 - DNA, 25 bp, probe
tagccctggagggtggcgtgatagg

SEQ ID NO: 290315 - DNA, 25 bp, probe
tagctccaggcaggtgtggcttcat

SEQ ID NO: 290316 - DNA, 25 bp, probe
tagcccagccagatgagtgctctgt

SEQ ID NO: 290317 - DNA, 25 bp, probe
tagcccatgggagaactctgagtgg

SEQ ID NO: 290318 - DNA, 25 bp, probe
tagctggcatggtagcacacacctg

SEQ ID NO: 290319 - DNA, 25 bp, probe
tagctggcagatgcccaacgggcac

SEQ ID NO: 290320 - DNA, 25 bp, probe
tagctggcagatgcccaacgggcac

SEQ ID NO: 290321 - DNA, 25 bp, probe
tagttggattccacatgtcctgcac

SEQ ID NO: 290322 - DNA, 25 bp, probe
tagttggattccacatgtcctgcac

SEQ ID NO: 290323 - DNA, 25 bp, probe
tagtggtatgtgcctgtagtcccag

SEQ ID NO: 290324 - DNA, 25 bp, probe
tagtggtttactagagccccacacc

SEQ ID NO: 290325 - DNA, 25 bp, probe
tagcgagtggtactttggcgccaac

SEQ ID NO: 290326 - DNA, 25 bp, probe
tagctgtgtggattgctgggggcct

SEQ ID NO: 290327 - DNA, 25 bp, probe
tagcgctagtgatgtgtgggccttt

SEQ ID NO: 290328 - DNA, 25 bp, probe
taggaagtgccagtgcagcggcagt

SEQ ID NO: 290329 - DNA, 25 bp, probe
taggcaagtcgaggcaatggaaaag

SEQ ID NO: 290330 - DNA, 25 bp, probe
tagggaacaagtgctggaaacagtg

SEQ ID NO: 290331 - DNA, 25 bp, probe
tagggaacaagtgctggaaacagtg

SEQ ID NO: 290332 - DNA, 25 bp, probe
tagggaatccacacttaatataatt

SEQ ID NO: 290333 - DNA, 25 bp, probe
tatgggaatttaacttactcaagca

SEQ ID NO: 290334 - DNA, 25 bp, probe
tagcatgaagcttttacttacttgg

SEQ ID NO: 290335 - DNA, 25 bp, probe
tagcatacactgttttcaataaatg

SEQ ID NO: 290336 - DNA, 25 bp, probe
tagctaactgccttctatgaaagca

SEQ ID NO: 290337 - DNA, 25 bp, probe
tagcatctgactcttttcataagca

SEQ ID NO: 290338 - DNA, 25 bp, probe
tagcattcaattatcttcatgaagg

SEQ ID NO: 290339 - DNA, 25 bp, probe
tagaatatagatccctttaagaaaa

SEQ ID NO: 290340 - DNA, 25 bp, probe
tagagtccaaatcctttataaaatt

SEQ ID NO: 290341 - DNA, 25 bp, probe
tagagattccaaaattagatacaga

SEQ ID NO: 290342 - DNA, 25 bp, probe
tagaatacacaaagaactggatcac

SEQ ID NO: 290343 - DNA, 25 bp, probe
tagaaaacatttgcctcagccacag

SEQ ID NO: 290344 - DNA, 25 bp, probe
tagaaagcattttaggccagccatg

SEQ ID NO: 290345 - DNA, 25 bp, probe
tagcaggagttattaaccagccata

SEQ ID NO: 290346 - DNA, 25 bp, probe
tagcagaactcattctatccccaat

SEQ ID NO: 290347 - DNA, 25 bp, probe
tagcaaatcttgtctactcctcaac

SEQ ID NO: 290348 - DNA, 25 bp, probe
tagatcaatgtttaactcagctcaa

SEQ ID NO: 290349 - DNA, 25 bp, probe
tagctccatttatagcacctcagac

SEQ ID NO: 290350 - DNA, 25 bp, probe
tatgcatcgcaataaaacagccaaa

SEQ ID NO: 290351 - DNA, 25 bp, probe
tagctgccaaataagattccccatt

SEQ ID NO: 290352 - DNA, 25 bp, probe
tagctacttcaaacattccccagta

SEQ ID NO: 290353 - DNA, 25 bp, probe
tagtcctggaacaattgcacaccag

SEQ ID NO: 290354 - DNA, 25 bp, probe
tagctgctcggacactcagaccgag

SEQ ID NO: 290355 - DNA, 25 bp, probe
tagctgctcggacactcagaccgag

SEQ ID NO: 290356 - DNA, 25 bp, probe
tatactccaagcgactagaccggag

SEQ ID NO: 290357 - DNA, 25 bp, probe
ttcaccacgatcgattagactggga

SEQ ID NO: 290358 - DNA, 25 bp, probe
tagcactgcccagcttggaaggtat

SEQ ID NO: 290359 - DNA, 25 bp, probe
tatccttctcccaggaagcagggga

SEQ ID NO: 290360 - DNA, 25 bp, probe
tattttaggcccctgcaactgggga

SEQ ID NO: 290361 - DNA, 25 bp, probe
tatttaaggaccccagagctaggcc

SEQ ID NO: 290362 - DNA, 25 bp, probe
tatttcaaggagaagcccctaccct

SEQ ID NO: 290363 - DNA, 25 bp, probe
tatttcaaggagaagcccctaccct

SEQ ID NO: 290364 - DNA, 25 bp, probe
tagtttcagagaatcacccttaccc

SEQ ID NO: 290365 - DNA, 25 bp, probe
tagtttcagagaatcacccttaccc

SEQ ID NO: 290366 - DNA, 25 bp, probe
tagtttcagagaatcacccttaccc

SEQ ID NO: 290367 - DNA, 25 bp, probe
tagattcttacaaggccctttcctt

SEQ ID NO: 290368 - DNA, 25 bp, probe
tagatgtttcaacagcacagtatct

SEQ ID NO: 290369 - DNA, 25 bp, probe
tatgagtttgactctcctttctggg

SEQ ID NO: 290370 - DNA, 25 bp, probe
tagacatttactatcactgcacctg

SEQ ID NO: 290371 - DNA, 25 bp, probe
tatgaatttcctgacaaagactggg

SEQ ID NO: 290372 - DNA, 25 bp, probe
tagagtttcttctcatcagagcact

SEQ ID NO: 290373 - DNA, 25 bp, probe
tagaggtcatcatcaatacagagtg

SEQ ID NO: 290374 - DNA, 25 bp, probe
tagagcgtgcagataatgacaagga

SEQ ID NO: 290375 - DNA, 25 bp, probe
tagagcgtgcagataatgacaagga

SEQ ID NO: 290376 - DNA, 25 bp, probe
tagactttttaataatggcatttga

SEQ ID NO: 290377 - DNA, 25 bp, probe
tagagctttttgtcactatctgtca

SEQ ID NO: 290378 - DNA, 25 bp, probe
tagcagttctggttcctctgatgga

SEQ ID NO: 290379 - DNA, 25 bp, probe
tagtattctggatcaccgtgaagga

SEQ ID NO: 290380 - DNA, 25 bp, probe
tagatatttcgaccctggggcgtgc

SEQ ID NO: 290381 - DNA, 25 bp, probe
tagatgcttctctgggtggaggggc

SEQ ID NO: 290382 - DNA, 25 bp, probe
tagcagcgctgctagctgggtgggg

SEQ ID NO: 290383 - DNA, 25 bp, probe
tagcagcagtgaacagggcatggca

SEQ ID NO: 290384 - DNA, 25 bp, probe
tagctcagatgatgcgggagtgctg

SEQ ID NO: 290385 - DNA, 25 bp, probe
tagaatctgaaggtgagaatctgag

SEQ ID NO: 290386 - DNA, 25 bp, probe
tagaactgaggtgggctagtggggg

SEQ ID NO: 290387 - DNA, 25 bp, probe
tagtgactgagtggggggtgctggc

SEQ ID NO: 290388 - DNA, 25 bp, probe
tagatacgtgtggttagtggctgcc

SEQ ID NO: 290389 - DNA, 25 bp, probe
tagagagagggtctttggctgcacc

SEQ ID NO: 290390 - DNA, 25 bp, probe
taggagagcgagaccatcctggcta

SEQ ID NO: 290391 - DNA, 25 bp, probe
tagcatgtgaaagcctctctggctg

SEQ ID NO: 290392 - DNA, 25 bp, probe
tagctatgtagcgctctgtagagcc

SEQ ID NO: 290393 - DNA, 25 bp, probe
tagctaggagcaggcttgtggcagc

SEQ ID NO: 290394 - DNA, 25 bp, probe
tagctcagatggaatgctttacatg

SEQ ID NO: 290395 - DNA, 25 bp, probe
tatgccatgaagcagtacgaatgca

SEQ ID NO: 290396 - DNA, 25 bp, probe
tagctatcacagcaaaggattccta

SEQ ID NO: 290397 - DNA, 25 bp, probe
tagctatcacagcaaaggattccta

SEQ ID NO: 290398 - DNA, 25 bp, probe
tagtctaaggccatggcatcccttt

SEQ ID NO: 290399 - DNA, 25 bp, probe
tagtctcaagggctagcatccctga

SEQ ID NO: 290400 - DNA, 25 bp, probe
tatactgaaggaagggctccctcga

SEQ ID NO: 290401 - DNA, 25 bp, probe
tatgaagacgagagctccttgcgcc

SEQ ID NO: 290402 - DNA, 25 bp, probe
tatgagaacattctgcaccagccgc

SEQ ID NO: 290403 - DNA, 25 bp, probe
tagaaagccatgtgcagccaccagt

SEQ ID NO: 290404 - DNA, 25 bp, probe
tagatatagctcaggaccccagcac

SEQ ID NO: 290405 - DNA, 25 bp, probe
tagagctactgcagaaccacagcct

SEQ ID NO: 290406 - DNA, 25 bp, probe
tagagccactcaaggaaacgcgtgc

SEQ ID NO: 290407 - DNA, 25 bp, probe
tatgagaaccagcgaaatcccccat

SEQ ID NO: 290408 - DNA, 25 bp, probe
tagagaagccagcagatcacatcat

SEQ ID NO: 290409 - DNA, 25 bp, probe
tagagtcagtcattatgaaatgtac

SEQ ID NO: 290410 - DNA, 25 bp, probe
tagcatttattgtgataagtacatt

SEQ ID NO: 290411 - DNA, 25 bp, probe
tagcattctttgtggagatggtctg

SEQ ID NO: 290412 - DNA, 25 bp, probe
tagcattgctttcgtgtaaattatg

SEQ ID NO: 290413 - DNA, 25 bp, probe
tagcactttctactctctgatattt

SEQ ID NO: 290414 - DNA, 25 bp, probe
tagaccttatttctgctactgttgc

SEQ ID NO: 290415 - DNA, 25 bp, probe
tagacctagttccaggatccatggg

SEQ ID NO: 290416 - DNA, 25 bp, probe
tagacaggaacccttgcatccattg

SEQ ID NO: 290417 - DNA, 25 bp, probe
tagacaggaacccttgcatccattg

SEQ ID NO: 290418 - DNA, 25 bp, probe
tagcacagagagccggaagtccttg

SEQ ID NO: 290419 - DNA, 25 bp, probe
tatgccaggatgccgagctacaggt

SEQ ID NO: 290420 - DNA, 25 bp, probe
taggaggcccaggtggcaggtagca

SEQ ID NO: 290421 - DNA, 25 bp, probe
taggaggcccaggtggcaggtagca

SEQ ID NO: 290422 - DNA, 25 bp, probe
taggaggcccaggtggcaggtagca

SEQ ID NO: 290423 - DNA, 25 bp, probe
tagggagcactcaggagggttcctt

SEQ ID NO: 290424 - DNA, 25 bp, probe
taggatggtgctgtctaggggtcca

SEQ ID NO: 290425 - DNA, 25 bp, probe
tagataggttccagtgtgtggtcta

SEQ ID NO: 290426 - DNA, 25 bp, probe
tagtaccttcacaaggtttctctcc

SEQ ID NO: 290427 - DNA, 25 bp, probe
tagctacctgttaaagaatcatctg

SEQ ID NO: 290428 - DNA, 25 bp, probe
tagtgctcctttatccaatttgtac

SEQ ID NO: 290429 - DNA, 25 bp, probe
tagtgctcgctttctatgtagtttg

SEQ ID NO: 290430 - DNA, 25 bp, probe
tagtgctcgctttctatgtagtttg

SEQ ID NO: 290431 - DNA, 25 bp, probe
tagcttccagtattcattgatttat

SEQ ID NO: 290432 - DNA, 25 bp, probe
tagcatttcagaatgtgtcttttga

SEQ ID NO: 290433 - DNA, 25 bp, probe
tagcagttcagccgttttctatgcc

SEQ ID NO: 290434 - DNA, 25 bp, probe
tagagcattgagcactttatctccc

SEQ ID NO: 290435 - DNA, 25 bp, probe
tagagatcgaagcctcctatctcca

SEQ ID NO: 290436 - DNA, 25 bp, probe
tatggtcaggagacccttagccacc

SEQ ID NO: 290437 - DNA, 25 bp, probe
taggggaaacagcctcatactccct

SEQ ID NO: 290438 - DNA, 25 bp, probe
tagaggcaacagtgttctgagcccc

SEQ ID NO: 290439 - DNA, 25 bp, probe
tagggtagcatgggattacagggcc

SEQ ID NO: 290440 - DNA, 25 bp, probe
taggggacgcctatatggtggcctc

SEQ ID NO: 290441 - DNA, 25 bp, probe
tatggtttgggtatggtttgcttgc

SEQ ID NO: 290442 - DNA, 25 bp, probe
taggttcgtttgagctttgtgttgt

SEQ ID NO: 290443 - DNA, 25 bp, probe
tagttctcttttgatgtaggttatt

SEQ ID NO: 290444 - DNA, 25 bp, probe
tagtcctttttccaatgttttattg

SEQ ID NO: 290445 - DNA, 25 bp, probe
tagtctttctgttcccatttttata

SEQ ID NO: 290446 - DNA, 25 bp, probe
tagatttatttgtatcgcatttttt

SEQ ID NO: 290447 - DNA, 25 bp, probe
tagatacatttagtcatcgatttat

SEQ ID NO: 290448 - DNA, 25 bp, probe
tagtgagcttgtgtctgcaaattga

SEQ ID NO: 290449 - DNA, 25 bp, probe
taggagcaagggcacaaactgcagc

SEQ ID NO: 290450 - DNA, 25 bp, probe
taggataaggggtcatcaatgctgg

SEQ ID NO: 290451 - DNA, 25 bp, probe
tatggaaaggggttgaggctgttta

SEQ ID NO: 290452 - DNA, 25 bp, probe
taggcaaagctgtgggagtcttgaa

SEQ ID NO: 290453 - DNA, 25 bp, probe
tagagcaactgcattgagggacatt

SEQ ID NO: 290454 - DNA, 25 bp, probe
tagcacaggctgagtgcaggcccac

SEQ ID NO: 290455 - DNA, 25 bp, probe
tagcacaggctgagtgcaggcccac

SEQ ID NO: 290456 - DNA, 25 bp, probe
tagaagagtggaccagccctgtgca

SEQ ID NO: 290457 - DNA, 25 bp, probe
taggaaatgctgttaacctggcagt

SEQ ID NO: 290458 - DNA, 25 bp, probe
taggagcaggatttcccctggggaa

SEQ ID NO: 290459 - DNA, 25 bp, probe
taggagcaggatttcccctggggaa

SEQ ID NO: 290460 - DNA, 25 bp, probe
tagggcatgcgtgtgaacttcggga

SEQ ID NO: 290461 - DNA, 25 bp, probe
tagggcatgcgtgtgaacttcggga

SEQ ID NO: 290462 - DNA, 25 bp, probe
tatggtctttggcaagcttcaggcg

SEQ ID NO: 290463 - DNA, 25 bp, probe
tagtgtttatggaaatctttagctt

SEQ ID NO: 290464 - DNA, 25 bp, probe
tagagtttattttttcttcatctga

SEQ ID NO: 290465 - DNA, 25 bp, probe
taggcatttgcctaattcctggcat

SEQ ID NO: 290466 - DNA, 25 bp, probe
taggtttcactactatctgcaaata

SEQ ID NO: 290467 - DNA, 25 bp, probe
tagtgtttcatcttcataattaatc

SEQ ID NO: 290468 - DNA, 25 bp, probe
tagttagctgctttaaatctatcta

SEQ ID NO: 290469 - DNA, 25 bp, probe
tagtacaggctatacacataattaa

SEQ ID NO: 290470 - DNA, 25 bp, probe
tatttagtgtggcagaataataaca

SEQ ID NO: 290471 - DNA, 25 bp, probe
tttggaggctggtcatcgcatgtca

SEQ ID NO: 290472 - DNA, 25 bp, probe
taggaacggtaaatttctgtgggag

SEQ ID NO: 290473 - DNA, 25 bp, probe
tttgagccagggaaacctccagggg

SEQ ID NO: 290474 - DNA, 25 bp, probe
tagtcagtatggctcaaccagccat

SEQ ID NO: 290475 - DNA, 25 bp, probe
tagtcattctaaaaaacacctaatt

SEQ ID NO: 290476 - DNA, 25 bp, probe
tagtgttctgtctaaaaaccagaca

SEQ ID NO: 290477 - DNA, 25 bp, probe
taggtctctaaggaaaaccagcaga

SEQ ID NO: 290478 - DNA, 25 bp, probe
taggatcctagactgtaaagacaca

SEQ ID NO: 290479 - DNA, 25 bp, probe
tagagctcctggacagtaaagtcct

SEQ ID NO: 290480 - DNA, 25 bp, probe
tagagctcctagaagttggtcatgc

SEQ ID NO: 290481 - DNA, 25 bp, probe
tatggccttgaagtgttttcatatt

SEQ ID NO: 290482 - DNA, 25 bp, probe
tatggccttgaagtgttttcatatt

SEQ ID NO: 290483 - DNA, 25 bp, probe
taggtttcaaagatgctgtgagtct

SEQ ID NO: 290484 - DNA, 25 bp, probe
taggactttagggatctgggatctg

SEQ ID NO: 290485 - DNA, 25 bp, probe
taggaacttcagagatcgtgtattg

SEQ ID NO: 290486 - DNA, 25 bp, probe
taggaacctcgaagctgttctctgc

SEQ ID NO: 290487 - DNA, 25 bp, probe
taggaacctcgaagctgttctctgc

SEQ ID NO: 290488 - DNA, 25 bp, probe
taggaatgccggcatgctggtcttt

SEQ ID NO: 290489 - DNA, 25 bp, probe
taggaaccctgtctcagtgcatttt

SEQ ID NO: 290490 - DNA, 25 bp, probe
taggaaccctgtctcagtgcatttt

SEQ ID NO: 290491 - DNA, 25 bp, probe
taggaaacccatgtgaggctcctca

SEQ ID NO: 290492 - DNA, 25 bp, probe
tagtaaccacctacaatagctttca

SEQ ID NO: 290493 - DNA, 25 bp, probe
tagtcactaccagtaccaatgatta

SEQ ID NO: 290494 - DNA, 25 bp, probe
tagtcattcagagcaactcaaggaa

SEQ ID NO: 290495 - DNA, 25 bp, probe
taggctatctacacactaaagaaga

SEQ ID NO: 290496 - DNA, 25 bp, probe
ttgcccctacgtctgaataaaagca

SEQ ID NO: 290497 - DNA, 25 bp, probe
ttcccagtaagtgcgggtcataagc

SEQ ID NO: 290498 - DNA, 25 bp, probe
ttcccttagggctggagaccacggg

SEQ ID NO: 290499 - DNA, 25 bp, probe
ttgccccaaaggtgagtccacggga

SEQ ID NO: 290500 - DNA, 25 bp, probe
tatgccccacagtgaccagtaaagt

SEQ ID NO: 290501 - DNA, 25 bp, probe
tatccaccactttaaccttagagct

SEQ ID NO: 290502 - DNA, 25 bp, probe
tatccaccactttaaccttagagct

SEQ ID NO: 290503 - DNA, 25 bp, probe
tatccccacctcaaaccaaggatca

SEQ ID NO: 290504 - DNA, 25 bp, probe
tatccccacctcaaaccaaggatca

SEQ ID NO: 290505 - DNA, 25 bp, probe
ttcaaaggcctcctatccaaagcta

SEQ ID NO: 290506 - DNA, 25 bp, probe
ttagaaagtccaattccaaagccag

SEQ ID NO: 290507 - DNA, 25 bp, probe
taggaaacaccacttccacaagtct

SEQ ID NO: 290508 - DNA, 25 bp, probe
taggaatgaactgtctgtgaaatgt

SEQ ID NO: 290509 - DNA, 25 bp, probe
tagtatgtgacttttctgattaata

SEQ ID NO: 290510 - DNA, 25 bp, probe
tagttgagttgtatctttagtattc

SEQ ID NO: 290511 - DNA, 25 bp, probe
tagtttgtattggactttatttcct

SEQ ID NO: 290512 - DNA, 25 bp, probe
tagtgattttagggctttgttattt

SEQ ID NO: 290513 - DNA, 25 bp, probe
tagtttttaatagtgttctctgtat

SEQ ID NO: 290514 - DNA, 25 bp, probe
tagtaggcttagttttttcagttgc

SEQ ID NO: 290515 - DNA, 25 bp, probe
tagaggcgctgtagtattttttttt

SEQ ID NO: 290516 - DNA, 25 bp, probe
tagaacgctggtgcaatgttttctt

SEQ ID NO: 290517 - DNA, 25 bp, probe
tagaacgtggattccttctttttca

SEQ ID NO: 290518 - DNA, 25 bp, probe
tagaactgtgagcttcgttgatgtt

SEQ ID NO: 290519 - DNA, 25 bp, probe
tagaagtgtgatgtgagttgttgtt

SEQ ID NO: 290520 - DNA, 25 bp, probe
tagtaatgtgggaagttgtgtctta

SEQ ID NO: 290521 - DNA, 25 bp, probe
tagggaggatggtagtgtgttttaa

SEQ ID NO: 290522 - DNA, 25 bp, probe
tagggaggatggtagtgtgttttaa

SEQ ID NO: 290523 - DNA, 25 bp, probe
tagttgaagggaaggtgcatattat

SEQ ID NO: 290524 - DNA, 25 bp, probe
tagttaagttaaggtgagatcacac

SEQ ID NO: 290525 - DNA, 25 bp, probe
tagtgtaaatggaaggcaaagcatc

SEQ ID NO: 290526 - DNA, 25 bp, probe
tagagttattggagacatatagctc

SEQ ID NO: 290527 - DNA, 25 bp, probe
tatgatgtttataagggcaaaggag

SEQ ID NO: 290528 - DNA, 25 bp, probe
tagagtgttcaaagcaggcccgagc

SEQ ID NO: 290529 - DNA, 25 bp, probe
tagatacttgaacgagtccccagtc

SEQ ID NO: 290530 - DNA, 25 bp, probe
tagaacctgacccagtaccagcata

SEQ ID NO: 290531 - DNA, 25 bp, probe
tagacctgcaaacagctaataggaa

SEQ ID NO: 290532 - DNA, 25 bp, probe
tagtttctgattcactattagagaa

SEQ ID NO: 290533 - DNA, 25 bp, probe
tagtttctgattcactattagagaa

SEQ ID NO: 290534 - DNA, 25 bp, probe
tagatacctgtttgactttgaggta

SEQ ID NO: 290535 - DNA, 25 bp, probe
tagtaaccttctgcttgtggtgcat

SEQ ID NO: 290536 - DNA, 25 bp, probe
tagtcaaccagttgcatcgtgcggg

SEQ ID NO: 290537 - DNA, 25 bp, probe
tagactcaccagagatattgtggat

SEQ ID NO: 290538 - DNA, 25 bp, probe
tagaccagaccccagtgattaatgt

SEQ ID NO: 290539 - DNA, 25 bp, probe
tagtccatacctgagtgctgtacat

SEQ ID NO: 290540 - DNA, 25 bp, probe
tagttcaaccatgattgatgatgaa

SEQ ID NO: 290541 - DNA, 25 bp, probe
tagttgccaccattttgtgcattcg

SEQ ID NO: 290542 - DNA, 25 bp, probe
taggggcccaattagcatcatctag

SEQ ID NO: 290543 - DNA, 25 bp, probe
taggtgggtctcaaagatgatgtag

SEQ ID NO: 290544 - DNA, 25 bp, probe
tagttggggtcatagatgtttcctt

SEQ ID NO: 290545 - DNA, 25 bp, probe
tagtctgtagcacaaaaattttcct

SEQ ID NO: 290546 - DNA, 25 bp, probe
tagatctccgcaccaagaatgcctt

SEQ ID NO: 290547 - DNA, 25 bp, probe
tagatcctgctcacagaatcacagc

SEQ ID NO: 290548 - DNA, 25 bp, probe
tagtcaatgcctatgaacacatcag

SEQ ID NO: 290549 - DNA, 25 bp, probe
tagtcacatttggtagacaacaggg

SEQ ID NO: 290550 - DNA, 25 bp, probe
tatgaccaatagctatgaagtcttg

SEQ ID NO: 290551 - DNA, 25 bp, probe
tagaccaatcagctgtgtcgcactt

SEQ ID NO: 290552 - DNA, 25 bp, probe
tagaccaagacctgttggtctggga

SEQ ID NO: 290553 - DNA, 25 bp, probe
tagatgccacaaagcggttaggctg

SEQ ID NO: 290554 - DNA, 25 bp, probe
tagacacaccaagcagattcgactg

SEQ ID NO: 290555 - DNA, 25 bp, probe
tatgacctcctcaacatattcgagc

SEQ ID NO: 290556 - DNA, 25 bp, probe
tttttcctgtacatttgggaactca

SEQ ID NO: 290557 - DNA, 25 bp, probe
ttattacatcgttcatccggtggaa

SEQ ID NO: 290558 - DNA, 25 bp, probe
tatttgccattgtgtccggggcacc

SEQ ID NO: 290559 - DNA, 25 bp, probe
tatgttatcttccctgggggtcacc

SEQ ID NO: 290560 - DNA, 25 bp, probe
tagttactatgccctgatgctggtt

SEQ ID NO: 290561 - DNA, 25 bp, probe
tagtcccgatgacctgatcggctgt

SEQ ID NO: 290562 - DNA, 25 bp, probe
tagtcccaggtactcaggaggctga

SEQ ID NO: 290563 - DNA, 25 bp, probe
tagatgggcagggcctaggggctgg

SEQ ID NO: 290564 - DNA, 25 bp, probe
tagagctggcatgaccaatgggggt

SEQ ID NO: 290565 - DNA, 25 bp, probe
tagagctggcatgaccaatgggggt

SEQ ID NO: 290566 - DNA, 25 bp, probe
tagagctgacaggacccttgaaggt

SEQ ID NO: 290567 - DNA, 25 bp, probe
tagagtacatcgatgccgtgaagga

SEQ ID NO: 290568 - DNA, 25 bp, probe
tagagtacatcgatgccgtgaagga

SEQ ID NO: 290569 - DNA, 25 bp, probe
tagagactatggagcctggcacagg

SEQ ID NO: 290570 - DNA, 25 bp, probe
tagagactatggagcctggcacagg

SEQ ID NO: 290571 - DNA, 25 bp, probe
tagagactatggagcctggcacagg

SEQ ID NO: 290572 - DNA, 25 bp, probe
taggattaggtttctgagctagggt

SEQ ID NO: 290573 - DNA, 25 bp, probe
tatgggaagtctgtcgattggtggt

SEQ ID NO: 290574 - DNA, 25 bp, probe
taggtaagataatttgttgggccat

SEQ ID NO: 290575 - DNA, 25 bp, probe
tagttacaacaattggtctcctcca

SEQ ID NO: 290576 - DNA, 25 bp, probe
tagtgaagctactgtgagtctttaa

SEQ ID NO: 290577 - DNA, 25 bp, probe
taggaatcattgcagcaagtgcttt

SEQ ID NO: 290578 - DNA, 25 bp, probe
tagacagacacgtcaccagactttc

SEQ ID NO: 290579 - DNA, 25 bp, probe
tagacggccaagtcgacagcttgcc

SEQ ID NO: 290580 - DNA, 25 bp, probe
tagaagtggctttcaccacctcatc

SEQ ID NO: 290581 - DNA, 25 bp, probe
tagagcagggctggtcataccctct

SEQ ID NO: 290582 - DNA, 25 bp, probe
tagaaggagctgggacacgcgcttg

SEQ ID NO: 290583 - DNA, 25 bp, probe
tagaagggtgcccagcacagcacat

SEQ ID NO: 290584 - DNA, 25 bp, probe
tatgtactgcaggcccagatagata

SEQ ID NO: 290585 - DNA, 25 bp, probe
tattaactgacgaagaagcaactaa

SEQ ID NO: 290586 - DNA, 25 bp, probe
tatacaactggcaaatggagcaaca

SEQ ID NO: 290587 - DNA, 25 bp, probe
tatcatgccaggcaaggtgaaccct

SEQ ID NO: 290588 - DNA, 25 bp, probe
tatgcttagtgccaatagtaagtgg

SEQ ID NO: 290589 - DNA, 25 bp, probe
tagtggttccacaagtaatgtcatg

SEQ ID NO: 290590 - DNA, 25 bp, probe
tagtggttccacaagtaatgtcatg

SEQ ID NO: 290591 - DNA, 25 bp, probe
taggtgtctgccttcacaaatgtca

SEQ ID NO: 290592 - DNA, 25 bp, probe
aaggccttagtgagcgagtcatgga

SEQ ID NO: 290593 - DNA, 25 bp, probe
tagatggtactctccaaaggcccta

SEQ ID NO: 290594 - DNA, 25 bp, probe
tagtttccttttcatgataccttca

SEQ ID NO: 290595 - DNA, 25 bp, probe
tagtttccttttcatgataccttca

SEQ ID NO: 290596 - DNA, 25 bp, probe
tagtttgacctcacagtgacccttc

SEQ ID NO: 290597 - DNA, 25 bp, probe
tagagttatccctgcaggagtcctt

SEQ ID NO: 290598 - DNA, 25 bp, probe
tagtgctgtatcacttaggtgtgca

SEQ ID NO: 290599 - DNA, 25 bp, probe
tagtgctgtatcacttaggtgtgca

SEQ ID NO: 290600 - DNA, 25 bp, probe
tagattgtgatcccttgagatatgg

SEQ ID NO: 290601 - DNA, 25 bp, probe
tagagttgactcttgctggtgaagt

SEQ ID NO: 290602 - DNA, 25 bp, probe
tagttctgacattgtctggctttct

SEQ ID NO: 290603 - DNA, 25 bp, probe
tagttctgacattgtctggctttct

SEQ ID NO: 290604 - DNA, 25 bp, probe
tagaactgatttatgagcttgctgt

SEQ ID NO: 290605 - DNA, 25 bp, probe
tagaacttatctactggatttccgt

SEQ ID NO: 290606 - DNA, 25 bp, probe
taggcattgttctctttggatccag

SEQ ID NO: 290607 - DNA, 25 bp, probe
tagaggtcttgatctttggaatgca

SEQ ID NO: 290608 - DNA, 25 bp, probe
tagaggtggatatgtatgggttgcc

SEQ ID NO: 290609 - DNA, 25 bp, probe
tagaggctgagttagtgacagggtg

SEQ ID NO: 290610 - DNA, 25 bp, probe
tagatgactacttgggccatcgggg

SEQ ID NO: 290611 - DNA, 25 bp, probe
tagaagcagcagctgggcctctggg

SEQ ID NO: 290612 - DNA, 25 bp, probe
tagaagcagcagctgggcctctggg

SEQ ID NO: 290613 - DNA, 25 bp, probe
tagaagcatcgacttgggctggagt

SEQ ID NO: 290614 - DNA, 25 bp, probe
tagaaccaaggcccagctggcagtg

SEQ ID NO: 290615 - DNA, 25 bp, probe
tagaactgcagataccactgaaaga

SEQ ID NO: 290616 - DNA, 25 bp, probe
tagacacatacataccaatcattag

SEQ ID NO: 290617 - DNA, 25 bp, probe
tagaagcttcgaactcaaaatcatg

SEQ ID NO: 290618 - DNA, 25 bp, probe
tatgtagtctggcagtataaatata

SEQ ID NO: 290619 - DNA, 25 bp, probe
tagtgcagctagtcgggtgtaattg

SEQ ID NO: 290620 - DNA, 25 bp, probe
tagacatcaatgttgggtttgacag

SEQ ID NO: 290621 - DNA, 25 bp, probe
tagaacattgatctgttttacagga

SEQ ID NO: 290622 - DNA, 25 bp, probe
taggactttgtttgtgttccaggac

SEQ ID NO: 290623 - DNA, 25 bp, probe
taggttactgtaagatgtttaagat

SEQ ID NO: 290624 - DNA, 25 bp, probe
taggcaggaatatgaggtgtaaact

SEQ ID NO: 290625 - DNA, 25 bp, probe
ttggcgggaatcacctgaaacagct

SEQ ID NO: 290626 - DNA, 25 bp, probe
tagaggggacatcacttagaagttc

SEQ ID NO: 290627 - DNA, 25 bp, probe
tagatggcaaagcccacttagcaaa

SEQ ID NO: 290628 - DNA, 25 bp, probe
taggaacatatgctcatttgagaaa

SEQ ID NO: 290629 - DNA, 25 bp, probe
taggattgcctgcttagatgataaa

SEQ ID NO: 290630 - DNA, 25 bp, probe
tagtgagtttgggtgatgcagataa

SEQ ID NO: 290631 - DNA, 25 bp, probe
tagtagctgtgctacgcatgcgctc

SEQ ID NO: 290632 - DNA, 25 bp, probe
tagtagctgtgctacgcatgcgctc

SEQ ID NO: 290633 - DNA, 25 bp, probe
tagatcactctgtagcgcatggtta

SEQ ID NO: 290634 - DNA, 25 bp, probe
tagatcactctgtagcgcatggtta

SEQ ID NO: 290635 - DNA, 25 bp, probe
tagatgcaattgacacaggagcctt

SEQ ID NO: 290636 - DNA, 25 bp, probe
tagtaatgtgcattcaggtgaattt

SEQ ID NO: 290637 - DNA, 25 bp, probe
tagtttgtgcttggaatatgactta

SEQ ID NO: 290638 - DNA, 25 bp, probe
tagtagtgtgttgataagagtgtaa

SEQ ID NO: 290639 - DNA, 25 bp, probe
tagtagattttggaatgtctcgaaa

SEQ ID NO: 290640 - DNA, 25 bp, probe
tagtacttactgcaatgctcgctgg

SEQ ID NO: 290641 - DNA, 25 bp, probe
tagacatccaaaggagatgctggca

SEQ ID NO: 290642 - DNA, 25 bp, probe
tagagatgccatttgtgggcagctc

SEQ ID NO: 290643 - DNA, 25 bp, probe
taggagctcatatctgacagcatct

SEQ ID NO: 290644 - DNA, 25 bp, probe
taggccttcagacgaccttttgtat

SEQ ID NO: 290645 - DNA, 25 bp, probe
tagggcttgcaatgaacttttccat

SEQ ID NO: 290646 - DNA, 25 bp, probe
tatgggggagattgaactttccccg

SEQ ID NO: 290647 - DNA, 25 bp, probe
tttggcgaagatcccactggaaccc

SEQ ID NO: 290648 - DNA, 25 bp, probe
tatccactgggtgccttggaacgca

SEQ ID NO: 290649 - DNA, 25 bp, probe
tatgacgctgggcacgttgagtgaa

SEQ ID NO: 290650 - DNA, 25 bp, probe
tagacttgtgatatgcgtgtgttta

SEQ ID NO: 290651 - DNA, 25 bp, probe
tagactttgcattccttgttctgtt

SEQ ID NO: 290652 - DNA, 25 bp, probe
tagatctcatacaaggcttattctt

SEQ ID NO: 290653 - DNA, 25 bp, probe
tagatccatccaagacttgactgta

SEQ ID NO: 290654 - DNA, 25 bp, probe
tagatcactcactgttgtagcttct

SEQ ID NO: 290655 - DNA, 25 bp, probe
tagatgagctaggatgcttccagct

SEQ ID NO: 290656 - DNA, 25 bp, probe
tagtgagctgactctgatgccagta

SEQ ID NO: 290657 - DNA, 25 bp, probe
tagtcagcaggttcagtccttatga

SEQ ID NO: 290658 - DNA, 25 bp, probe
tattatgcgtattcagtttgtaaac

SEQ ID NO: 290659 - DNA, 25 bp, probe
tagtatgctattaagtcattctgaa

SEQ ID NO: 290660 - DNA, 25 bp, probe
tagttgtatatttgtaagatgacag

SEQ ID NO: 290661 - DNA, 25 bp, probe
tagttttaccctactgatgatgtgt

SEQ ID NO: 290662 - DNA, 25 bp, probe
tagttaatacaggtttacagttcat

SEQ ID NO: 290663 - DNA, 25 bp, probe
tagtaaacacaagaggacaggttaa

SEQ ID NO: 290664 - DNA, 25 bp, probe
taggacctccaaggactaagcctcc

SEQ ID NO: 290665 - DNA, 25 bp, probe
tagaaactccaatgaaagacactgt

SEQ ID NO: 290666 - DNA, 25 bp, probe
tagaaagcctcatgaacaaactgct

SEQ ID NO: 290667 - DNA, 25 bp, probe
tagattacctcggataccacaagtg

SEQ ID NO: 290668 - DNA, 25 bp, probe
tagttatgcttccaagacgccaatg

SEQ ID NO: 290669 - DNA, 25 bp, probe
tagtttgctttgctgaccaaatgcc

SEQ ID NO: 290670 - DNA, 25 bp, probe
tagtgttgctctggcacagaccact

SEQ ID NO: 290671 - DNA, 25 bp, probe
tagtgttgagtggcacaaccttgta

SEQ ID NO: 290672 - DNA, 25 bp, probe
tagtcatcgatttatcaatcccgtt

SEQ ID NO: 290673 - DNA, 25 bp, probe
tagtccgaatgttagattcctcttg

SEQ ID NO: 290674 - DNA, 25 bp, probe
taggtcgaatcttctttcgcggttt

SEQ ID NO: 290675 - DNA, 25 bp, probe
taggagcccattttttcctaatctg

SEQ ID NO: 290676 - DNA, 25 bp, probe
taggagcccggactggctcagtgca

SEQ ID NO: 290677 - DNA, 25 bp, probe
tagtgagggtgccctggtcatgatc

SEQ ID NO: 290678 - DNA, 25 bp, probe
tagatgtgtgggccctgggcgtcat

SEQ ID NO: 290679 - DNA, 25 bp, probe
taggttggttcactgccgagtgcat

SEQ ID NO: 290680 - DNA, 25 bp, probe
taggttggttcactgccgagtgcat

SEQ ID NO: 290681 - DNA, 25 bp, probe
taggaagagttctcctgaggctgtc

SEQ ID NO: 290682 - DNA, 25 bp, probe
tagggcgagtttgcctgaagctctg

SEQ ID NO: 290683 - DNA, 25 bp, probe
tatgggctgataaacccggggtgac

SEQ ID NO: 290684 - DNA, 25 bp, probe
tatggtgtacacaacggcgctggtg

SEQ ID NO: 290685 - DNA, 25 bp, probe
tagggtacactcagaccgtaaagcc

SEQ ID NO: 290686 - DNA, 25 bp, probe
tagggtacactcagaccgtaaagcc

SEQ ID NO: 290687 - DNA, 25 bp, probe
tagagggaactcagactcctttccc

SEQ ID NO: 290688 - DNA, 25 bp, probe
tagggatgtaccatgaccctctcag

SEQ ID NO: 290689 - DNA, 25 bp, probe
tagggatggacttggttcctcttgt

SEQ ID NO: 290690 - DNA, 25 bp, probe
tagggatggacttggttcctcttgt

SEQ ID NO: 290691 - DNA, 25 bp, probe
tagggtgtagctgggtacatattaa

SEQ ID NO: 290692 - DNA, 25 bp, probe
tatgggttaggggtcttgattaatt

SEQ ID NO: 290693 - DNA, 25 bp, probe
tatgggttaggggtcttgattaatt

SEQ ID NO: 290694 - DNA, 25 bp, probe
taggagttggggggctccactgagt

SEQ ID NO: 290695 - DNA, 25 bp, probe
tttgcagcttgcggcggaatcacag

SEQ ID NO: 290696 - DNA, 25 bp, probe
tatgtcagttcagtcggaacaaagt

SEQ ID NO: 290697 - DNA, 25 bp, probe
tagtcggttggtgaaaaagatacct

SEQ ID NO: 290698 - DNA, 25 bp, probe
tagtctgtttgcctaaaaaccaatt

SEQ ID NO: 290699 - DNA, 25 bp, probe
tagtttgatatcctcacaaagcatc

SEQ ID NO: 290700 - DNA, 25 bp, probe
tagacgtcattcccacagacattca

SEQ ID NO: 290701 - DNA, 25 bp, probe
tatgggtctccagaaactctgccag

SEQ ID NO: 290702 - DNA, 25 bp, probe
taggactcccataaatcactggggg

SEQ ID NO: 290703 - DNA, 25 bp, probe
tagtactgcccatgactagttggtg

SEQ ID NO: 290704 - DNA, 25 bp, probe
tagtcacatggcctatgcacatatg

SEQ ID NO: 290705 - DNA, 25 bp, probe
caccctggtgttgactgactttaac

SEQ ID NO: 290706 - DNA, 25 bp, probe
taggccatatcttaggggcgtctgg

SEQ ID NO: 290707 - DNA, 25 bp, probe
taggccatatcttaggggcgtctgg

SEQ ID NO: 290708 - DNA, 25 bp, probe
taggatcatttattgggcagttggg

SEQ ID NO: 290709 - DNA, 25 bp, probe
taggtgtatatattattggataagg

SEQ ID NO: 290710 - DNA, 25 bp, probe
tagggtacagtctactagtgaatta

SEQ ID NO: 290711 - DNA, 25 bp, probe
tagaggatacttgaatggacctcta

SEQ ID NO: 290712 - DNA, 25 bp, probe
tagaggtggctacagacgcacctct

SEQ ID NO: 290713 - DNA, 25 bp, probe
tagatgagggctatcgactgccacc

SEQ ID NO: 290714 - DNA, 25 bp, probe
tagatgcaggtccattctgcacctc

SEQ ID NO: 290715 - DNA, 25 bp, probe
tagatgtgcgtgcagtctggcagcc

SEQ ID NO: 290716 - DNA, 25 bp, probe
tagatgtatggtctgctggctgtgt

SEQ ID NO: 290717 - DNA, 25 bp, probe
taggtcaggtgcgttatctcagctt

SEQ ID NO: 290718 - DNA, 25 bp, probe
taggtcaggtgcgttatctcagctt

SEQ ID NO: 290719 - DNA, 25 bp, probe
tatgaccagggcgtcgatctgtggt

SEQ ID NO: 290720 - DNA, 25 bp, probe
tatgaccagggcgtcgatctgtggt

SEQ ID NO: 290721 - DNA, 25 bp, probe
tagatctctcgccgccaatgcttgt

SEQ ID NO: 290722 - DNA, 25 bp, probe
tagatgctgacctccatcattttgg

SEQ ID NO: 290723 - DNA, 25 bp, probe
tagatgggccgacacacacttggcc

SEQ ID NO: 290724 - DNA, 25 bp, probe
tattgggccaagcccagaagtggtc

SEQ ID NO: 290725 - DNA, 25 bp, probe
taggggccatagaccatacatacga

SEQ ID NO: 290726 - DNA, 25 bp, probe
tagagcagagcctgaccctaaaaag

SEQ ID NO: 290727 - DNA, 25 bp, probe
tagatcaggacccgtcctcaataac

SEQ ID NO: 290728 - DNA, 25 bp, probe
tagtgcaagttcaatccctaaaaca

SEQ ID NO: 290729 - DNA, 25 bp, probe
tatcaaagcttccactttaacaaaa

SEQ ID NO: 290730 - DNA, 25 bp, probe
tatacaagcatgcccaatcttagag

SEQ ID NO: 290731 - DNA, 25 bp, probe
tatacatgatgcacctacatatggt

SEQ ID NO: 290732 - DNA, 25 bp, probe
tataattgctggctggtgggttgca

SEQ ID NO: 290733 - DNA, 25 bp, probe
ttaacgtggtgctgttggtccatct

SEQ ID NO: 290734 - DNA, 25 bp, probe
ttcaaagtgggcagcttcccagcct

SEQ ID NO: 290735 - DNA, 25 bp, probe
tatcaaagggacagggtcctggacc

SEQ ID NO: 290736 - DNA, 25 bp, probe
tatccagaggtgagggaggcctgaa

SEQ ID NO: 290737 - DNA, 25 bp, probe
taggcgagatagggggaagacagat

SEQ ID NO: 290738 - DNA, 25 bp, probe
taggtgaccgctgtgagaacaagat

SEQ ID NO: 290739 - DNA, 25 bp, probe
tatggtgtcccagtaaagccaatga

SEQ ID NO: 290740 - DNA, 25 bp, probe
ttgtggaatggagtaaaccagtgaa

SEQ ID NO: 290741 - DNA, 25 bp, probe
tagggttcagcaagaaatccagtaa

SEQ ID NO: 290742 - DNA, 25 bp, probe
tatggcttcattgagaaactgggaa

SEQ ID NO: 290743 - DNA, 25 bp, probe
tatggaactctttagaattggtgga

SEQ ID NO: 290744 - DNA, 25 bp, probe
tatgaaaacctgggtttggttggag

SEQ ID NO: 290745 - DNA, 25 bp, probe
tatgaaaaatacccttttttcagag

SEQ ID NO: 290746 - DNA, 25 bp, probe
tataaattttgcccttccatttcta

SEQ ID NO: 290747 - DNA, 25 bp, probe
tagtgaactttcagctaccttttaa

SEQ ID NO: 290748 - DNA, 25 bp, probe
taggagactttaatcccggtttcag

SEQ ID NO: 290749 - DNA, 25 bp, probe
taggagactttaatcccggtttcag

SEQ ID NO: 290750 - DNA, 25 bp, probe
taggcaatttttacaacctgagttc

SEQ ID NO: 290751 - DNA, 25 bp, probe
tagagcaattgtttttcgtccgttt

SEQ ID NO: 290752 - DNA, 25 bp, probe
tagagcaattcctttgctttccctc

SEQ ID NO: 290753 - DNA, 25 bp, probe
tagatgcagtttcttcctttcgcat

SEQ ID NO: 290754 - DNA, 25 bp, probe
taggcagctatgggtttcttttgat

SEQ ID NO: 290755 - DNA, 25 bp, probe
taggatttgggtatctctctttgct

SEQ ID NO: 290756 - DNA, 25 bp, probe
tagtgcatttagttttgtctttctc

SEQ ID NO: 290757 - DNA, 25 bp, probe
tagttactgagtccactttattctg

SEQ ID NO: 290758 - DNA, 25 bp, probe
tattacgaatgcccctgttcatgtt

SEQ ID NO: 290759 - DNA, 25 bp, probe
tatgtcaggaatgtgattcttcatc

SEQ ID NO: 290760 - DNA, 25 bp, probe
tagtagcagcctaatcttcttcact

SEQ ID NO: 290761 - DNA, 25 bp, probe
tagggagctattcatgtttcacttg

SEQ ID NO: 290762 - DNA, 25 bp, probe
tatgttattcctctgtgttcacttc

SEQ ID NO: 290763 - DNA, 25 bp, probe
tatatcaattccgggttgaaccctt

SEQ ID NO: 290764 - DNA, 25 bp, probe
tataaatccctgtatcgtggacctt

SEQ ID NO: 290765 - DNA, 25 bp, probe
tataactactgtttccatgtcccat

SEQ ID NO: 290766 - DNA, 25 bp, probe
tagagtggttattcattattcctca

SEQ ID NO: 290767 - DNA, 25 bp, probe
tagagtggttattcattattcctca

SEQ ID NO: 290768 - DNA, 25 bp, probe
tagagacagtttgcactttcccata

SEQ ID NO: 290769 - DNA, 25 bp, probe
taggacacctgtgcagggtcccaga

SEQ ID NO: 290770 - DNA, 25 bp, probe
taggaccactggacttttccacaaa

SEQ ID NO: 290771 - DNA, 25 bp, probe
tagtgataattgcattttcctatca

SEQ ID NO: 290772 - DNA, 25 bp, probe
tagtttattataatcatccctctat

SEQ ID NO: 290773 - DNA, 25 bp, probe
taggctatttaaactccctcatcaa

SEQ ID NO: 290774 - DNA, 25 bp, probe
tatgtctattttaggcctctgtcca

SEQ ID NO: 290775 - DNA, 25 bp, probe
tagatctggcatgttagcccttcct

SEQ ID NO: 290776 - DNA, 25 bp, probe
tagatctggcatgttagcccttcct

SEQ ID NO: 290777 - DNA, 25 bp, probe
tagtcatggcagatggagcctatca

SEQ ID NO: 290778 - DNA, 25 bp, probe
tagtcatggcagatggagcctatca

SEQ ID NO: 290779 - DNA, 25 bp, probe
tagtcatgaggtagattcttccaga

SEQ ID NO: 290780 - DNA, 25 bp, probe
tagtcatgtgtttcatttatcccat

SEQ ID NO: 290781 - DNA, 25 bp, probe
tagtcttttatgattacaccaatgt

SEQ ID NO: 290782 - DNA, 25 bp, probe
taggctttgtggatgtccagaactg

SEQ ID NO: 290783 - DNA, 25 bp, probe
tagtctttgtgtgcttgctaaatgg

SEQ ID NO: 290784 - DNA, 25 bp, probe
tagtcttgtttcccatgtaaataaa

SEQ ID NO: 290785 - DNA, 25 bp, probe
tagtttggccaattctgtagtatta

SEQ ID NO: 290786 - DNA, 25 bp, probe
taggctgggccctctgagaggttgg

SEQ ID NO: 290787 - DNA, 25 bp, probe
taggttggcccgagtgaggcctctg

SEQ ID NO: 290788 - DNA, 25 bp, probe
taggtgtgaccagggtgggccaccg

SEQ ID NO: 290789 - DNA, 25 bp, probe
taggtgtgaccagggtgggccaccg

SEQ ID NO: 290790 - DNA, 25 bp, probe
ttctgattcaccaggggtccgtcag

SEQ ID NO: 290791 - DNA, 25 bp, probe
tttattccacaagggccccgtgatc

SEQ ID NO: 290792 - DNA, 25 bp, probe
tttattccacaagggccccgtgatc

SEQ ID NO: 290793 - DNA, 25 bp, probe
tatcttttccaagagccccattttt

SEQ ID NO: 290794 - DNA, 25 bp, probe
ttttttcacactgatccgtattccc

SEQ ID NO: 290795 - DNA, 25 bp, probe
ttttttcacactgatccgtattccc

SEQ ID NO: 290796 - DNA, 25 bp, probe
ttttgttaccacaccacttacacac

SEQ ID NO: 290797 - DNA, 25 bp, probe
ttttgttaccacaccacttacacac

SEQ ID NO: 290798 - DNA, 25 bp, probe
tagttttaccctatatctataaaca

SEQ ID NO: 290799 - DNA, 25 bp, probe
tagttttcaccactgtgatctttaa

SEQ ID NO: 290800 - DNA, 25 bp, probe
tagttttcaccactgtgatctttaa

SEQ ID NO: 290801 - DNA, 25 bp, probe
tagtgtttcaaacgttctttatcca

SEQ ID NO: 290802 - DNA, 25 bp, probe
tatgtccaaaaacgtttttcctgat

SEQ ID NO: 290803 - DNA, 25 bp, probe
tatgggaacagagggtctttttcga

SEQ ID NO: 290804 - DNA, 25 bp, probe
taggtgtcacgctgttttttttaat

SEQ ID NO: 290805 - DNA, 25 bp, probe
taggtgtcacgctgttttttttaat

SEQ ID NO: 290806 - DNA, 25 bp, probe
taggtggacctcacttgtttttaga

SEQ ID NO: 290807 - DNA, 25 bp, probe
taggtggacctcacttgtttttaga

SEQ ID NO: 290808 - DNA, 25 bp, probe
taggtggataacacctgcttttcaa

SEQ ID NO: 290809 - DNA, 25 bp, probe
taggttgaaacatatctcttatctt

SEQ ID NO: 290810 - DNA, 25 bp, probe
tagagtagcctaaaattactattct

SEQ ID NO: 290811 - DNA, 25 bp, probe
tagaggcgcctagaaattccacttg

SEQ ID NO: 290812 - DNA, 25 bp, probe
tagggctgcctagggcaaagccagt

SEQ ID NO: 290813 - DNA, 25 bp, probe
taggcagcgttaggcgttaccagct

SEQ ID NO: 290814 - DNA, 25 bp, probe
tagtgagccttggaggtacacccta

SEQ ID NO: 290815 - DNA, 25 bp, probe
tagatagccactcacatgtgcgcac

SEQ ID NO: 290816 - DNA, 25 bp, probe
tagtagaatcgccactgtctgcgct

SEQ ID NO: 290817 - DNA, 25 bp, probe
tagtagaagcggcaggcagctgtcc

SEQ ID NO: 290818 - DNA, 25 bp, probe
taggatgaaccgttggcatgctcca

SEQ ID NO: 290819 - DNA, 25 bp, probe
taggatgcttccagctagagcttcg

SEQ ID NO: 290820 - DNA, 25 bp, probe
taggatgcttccagctagagcttcg

SEQ ID NO: 290821 - DNA, 25 bp, probe
tagagtcctccaaggaggcatcact

SEQ ID NO: 290822 - DNA, 25 bp, probe
tagaggcgctgggcagagagtcaag

SEQ ID NO: 290823 - DNA, 25 bp, probe
tagagtgcagagccaagcagagcat

SEQ ID NO: 290824 - DNA, 25 bp, probe
tagagtgcagagccaagcagagcat

SEQ ID NO: 290825 - DNA, 25 bp, probe
tagtctgatgacgatagcaaataat

SEQ ID NO: 290826 - DNA, 25 bp, probe
tatcgtaacagttcataatattcta

SEQ ID NO: 290827 - DNA, 25 bp, probe
tatggtagaatttcccatgcattta

SEQ ID NO: 290828 - DNA, 25 bp, probe
tatggttcaatttacgactgcctat

SEQ ID NO: 290829 - DNA, 25 bp, probe
ttagtgtctacttgcaggacccttc

SEQ ID NO: 290830 - DNA, 25 bp, probe
ttagtgtctacttgcaggacccttc

SEQ ID NO: 290831 - DNA, 25 bp, probe
ttagtgtctacttgcaggacccttc

SEQ ID NO: 290832 - DNA, 25 bp, probe
tatggttctcctactaactagcttc

SEQ ID NO: 290833 - DNA, 25 bp, probe
tatggttcctttggtcgctcgctcc

SEQ ID NO: 290834 - DNA, 25 bp, probe
tatagtcaactttggtttcagcacc

SEQ ID NO: 290835 - DNA, 25 bp, probe
tatcagtggacgacgccttacagca

SEQ ID NO: 290836 - DNA, 25 bp, probe
tatcagagcacttgatcgcctacaa

SEQ ID NO: 290837 - DNA, 25 bp, probe
tagaggactatgggcctacctcacc

SEQ ID NO: 290838 - DNA, 25 bp, probe
taggtgacaacggcaaaccatccac

SEQ ID NO: 290839 - DNA, 25 bp, probe
taggtgacaacggcaaaccatccac

SEQ ID NO: 290840 - DNA, 25 bp, probe
tagaggacattcaacaagaaatcac

SEQ ID NO: 290841 - DNA, 25 bp, probe
taggcaatttcttgcaaccaccacc

SEQ ID NO: 290842 - DNA, 25 bp, probe
taggcaatttcttgcaaccaccacc

SEQ ID NO: 290843 - DNA, 25 bp, probe
taggccagattctaaaacatgctgc

SEQ ID NO: 290844 - DNA, 25 bp, probe
taggtcagccactagatgtatttgt

SEQ ID NO: 290845 - DNA, 25 bp, probe
tagattgcctcacagttgtttgttt

SEQ ID NO: 290846 - DNA, 25 bp, probe
tagattgctcaaatcaggttttctt

SEQ ID NO: 290847 - DNA, 25 bp, probe
tagatatcctatcatcagtattatt

SEQ ID NO: 290848 - DNA, 25 bp, probe
tatggtgcatctttacagtactata

SEQ ID NO: 290849 - DNA, 25 bp, probe
tatggttttaacctgatgctccact

SEQ ID NO: 290850 - DNA, 25 bp, probe
tatgtatttgtacactatctggcac

SEQ ID NO: 290851 - DNA, 25 bp, probe
tagtttcttcagttcaatgttcacc

SEQ ID NO: 290852 - DNA, 25 bp, probe
tagtttcttcagttcaatgttcacc

SEQ ID NO: 290853 - DNA, 25 bp, probe
taggtttgtatgttacattgtccaa

SEQ ID NO: 290854 - DNA, 25 bp, probe
taggatcttgttgaatccagtccag

SEQ ID NO: 290855 - DNA, 25 bp, probe
tagattttcctataccatgtccact

SEQ ID NO: 290856 - DNA, 25 bp, probe
tagattttcctataccatgtccact

SEQ ID NO: 290857 - DNA, 25 bp, probe
tagtaatccttatcaccatgaccag

SEQ ID NO: 290858 - DNA, 25 bp, probe
tagtgacatagcttaccagtagacc

SEQ ID NO: 290859 - DNA, 25 bp, probe
tagtgacatagcttaccagtagacc

SEQ ID NO: 290860 - DNA, 25 bp, probe
tagtgaaacattaagctgtagactg

SEQ ID NO: 290861 - DNA, 25 bp, probe
taggaaccattcaacttagttccca

SEQ ID NO: 290862 - DNA, 25 bp, probe
taggatacaatggctgtttggttcc

SEQ ID NO: 290863 - DNA, 25 bp, probe
tagtataagtctgggcactggatgc

SEQ ID NO: 290864 - DNA, 25 bp, probe
tagatgcacaccttgtgccactgga

SEQ ID NO: 290865 - DNA, 25 bp, probe
tatgatgtccgctctgatgtctgga

SEQ ID NO: 290866 - DNA, 25 bp, probe
tatggatgccctacaggactctagt

SEQ ID NO: 290867 - DNA, 25 bp, probe
tatggaccacatacggatcttccaa

SEQ ID NO: 290868 - DNA, 25 bp, probe
tatggaccacagattggcctccaat

SEQ ID NO: 290869 - DNA, 25 bp, probe
tatggttacatatttagcgcaccca

SEQ ID NO: 290870 - DNA, 25 bp, probe
tatgggtcaatatttggccagtacc

SEQ ID NO: 290871 - DNA, 25 bp, probe
tatggtatcatatgttaaactaagc

SEQ ID NO: 290872 - DNA, 25 bp, probe
tatggaagccactttagaatcttat

SEQ ID NO: 290873 - DNA, 25 bp, probe
tatggaagccactttagaatcttat

SEQ ID NO: 290874 - DNA, 25 bp, probe
tatggcagaatctatttgggacttc

SEQ ID NO: 290875 - DNA, 25 bp, probe
tatggcagaatctatttgggacttc

SEQ ID NO: 290876 - DNA, 25 bp, probe
tagggaagcagtatgggtgcagtcc

SEQ ID NO: 290877 - DNA, 25 bp, probe
taggaacacataactctagctgccc

SEQ ID NO: 290878 - DNA, 25 bp, probe
taggaacacataactctagctgccc

SEQ ID NO: 290879 - DNA, 25 bp, probe
tatggaagcagaaaactggcagctg

SEQ ID NO: 290880 - DNA, 25 bp, probe
taggcaggcctgtagacttgccatg

SEQ ID NO: 290881 - DNA, 25 bp, probe
taggtgtggtgttgactgtcctttc

SEQ ID NO: 290882 - DNA, 25 bp, probe
tagtcttggttctgaaacttctcta

SEQ ID NO: 290883 - DNA, 25 bp, probe
tagtctttttcatgtattttcctca

SEQ ID NO: 290884 - DNA, 25 bp, probe
tagtcttttgtgttgtttattttct

SEQ ID NO: 290885 - DNA, 25 bp, probe
taggcttccagtctgtgtttggttt

SEQ ID NO: 290886 - DNA, 25 bp, probe
taggtataagtggtgtgtgtatgcg

SEQ ID NO: 290887 - DNA, 25 bp, probe
taggtaacatgtggtttcttgcctt

SEQ ID NO: 290888 - DNA, 25 bp, probe
taggcccagcagtggttcttgacat

SEQ ID NO: 290889 - DNA, 25 bp, probe
taggcccagcagtggttcttgacat

SEQ ID NO: 290890 - DNA, 25 bp, probe
tagggatcacactggttggtcatca

SEQ ID NO: 290891 - DNA, 25 bp, probe
taggctctcaacaaatgtgtggtaa

SEQ ID NO: 290892 - DNA, 25 bp, probe
taggctgcatcatctttgagtacta

SEQ ID NO: 290893 - DNA, 25 bp, probe
taggccactggcttagagtactcct

SEQ ID NO: 290894 - DNA, 25 bp, probe
tagggctctgtgagaggtggggcag

SEQ ID NO: 290895 - DNA, 25 bp, probe
taggcagcctggtgagggggggcag

SEQ ID NO: 290896 - DNA, 25 bp, probe
taggaactagaccaaaggcgctggg

SEQ ID NO: 290897 - DNA, 25 bp, probe
tagggagatattcaacaggagggcg

SEQ ID NO: 290898 - DNA, 25 bp, probe
tatgggaatcatagggaaagagagg

SEQ ID NO: 290899 - DNA, 25 bp, probe
tagggagcacaaacaagaagagact

SEQ ID NO: 290900 - DNA, 25 bp, probe
tagggcagatcactctcaagaagga

SEQ ID NO: 290901 - DNA, 25 bp, probe
taggccagtcagtgaagaatggaaa

SEQ ID NO: 290902 - DNA, 25 bp, probe
tatgtgacagaaaagaaccaggaaa

SEQ ID NO: 290903 - DNA, 25 bp, probe
tatgaaccgcaatatgggaggaaca

SEQ ID NO: 290904 - DNA, 25 bp, probe
ttaactcagaggcggggagggaaca

SEQ ID NO: 290905 - DNA, 25 bp, probe
ttaactcagaggcggggagggaaca

SEQ ID NO: 290906 - DNA, 25 bp, probe
ttaaaagttgctagtactggggaga

SEQ ID NO: 290907 - DNA, 25 bp, probe
ttaagatcccttctactcggggcaa

SEQ ID NO: 290908 - DNA, 25 bp, probe
ttaagatcccttctactcggggcaa

SEQ ID NO: 290909 - DNA, 25 bp, probe
ttaaatattcttctgacttaggatt

SEQ ID NO: 290910 - DNA, 25 bp, probe
tataaaccctctcttttatggcttt

SEQ ID NO: 290911 - DNA, 25 bp, probe
tatacacccagcactttggaaggct

SEQ ID NO: 290912 - DNA, 25 bp, probe
ttgaacctccaacagggaaggctct

SEQ ID NO: 290913 - DNA, 25 bp, probe
ttgaaccttctcccaggtaggggca

SEQ ID NO: 290914 - DNA, 25 bp, probe
tataaacttttaggcctgaatagga

SEQ ID NO: 290915 - DNA, 25 bp, probe
tattaacttactcacacggacaggt

SEQ ID NO: 290916 - DNA, 25 bp, probe
tttcaaatttttagccaggtactct

SEQ ID NO: 290917 - DNA, 25 bp, probe
tttcaaatttttagccaggtactct

SEQ ID NO: 290918 - DNA, 25 bp, probe
tataaaaagtcttcccctgtcattt

SEQ ID NO: 290919 - DNA, 25 bp, probe
ttaaagtagttactcccttctcgtg

SEQ ID NO: 290920 - DNA, 25 bp, probe
tatgtataatacttagatcctcctt

SEQ ID NO: 290921 - DNA, 25 bp, probe
tatgtaaaagacaatactcttgtgt

SEQ ID NO: 290922 - DNA, 25 bp, probe
tatgtgttaccaattaattttgttt

SEQ ID NO: 290923 - DNA, 25 bp, probe
tatgttaacctttaagagatttgtt

SEQ ID NO: 290924 - DNA, 25 bp, probe
tatgttaacctttaagagatttgtt

SEQ ID NO: 290925 - DNA, 25 bp, probe
tatgtttgggtaaccaaattggtct

SEQ ID NO: 290926 - DNA, 25 bp, probe
tatgattcatggggaactccatttc

SEQ ID NO: 290927 - DNA, 25 bp, probe
tagtatagatgctgacctccatcat

SEQ ID NO: 290928 - DNA, 25 bp, probe
tagtctatatgcttgtgcttctcca

SEQ ID NO: 290929 - DNA, 25 bp, probe
tagtctatatgcttgtgcttctcca

SEQ ID NO: 290930 - DNA, 25 bp, probe
tagttatcacaaggcctgcactcaa

SEQ ID NO: 290931 - DNA, 25 bp, probe
tagtactcaagagccatgactgccc

SEQ ID NO: 290932 - DNA, 25 bp, probe
tatgcaacctaaagccatggtcccc

SEQ ID NO: 290933 - DNA, 25 bp, probe
tatgctaccggcagtagagacccca

SEQ ID NO: 290934 - DNA, 25 bp, probe
tatgtcacctccagtgactaccggg

SEQ ID NO: 290935 - DNA, 25 bp, probe
tattaattccaagggcataccccgc

SEQ ID NO: 290936 - DNA, 25 bp, probe
tattttgggagggctcaactccgcc

SEQ ID NO: 290937 - DNA, 25 bp, probe
tttcattttggtgtgcaaccctgtc

SEQ ID NO: 290938 - DNA, 25 bp, probe
tattgaattgttcttaaacctgtaa

SEQ ID NO: 290939 - DNA, 25 bp, probe
tttggtcagttgcttccaatgctgg

SEQ ID NO: 290940 - DNA, 25 bp, probe
tttcaacgtgatgttcccgatgggc

SEQ ID NO: 290941 - DNA, 25 bp, probe
tttaacggatcatatctcctggatg

SEQ ID NO: 290942 - DNA, 25 bp, probe
tattttccgtagtgctctgggtggg

SEQ ID NO: 290943 - DNA, 25 bp, probe
tattttgggaagggttgctgggtgg

SEQ ID NO: 290944 - DNA, 25 bp, probe
ttttagggaaagatgtgttgtggta

SEQ ID NO: 290945 - DNA, 25 bp, probe
tatgttggtattaacggtggtgggt

SEQ ID NO: 290946 - DNA, 25 bp, probe
tagttgtgtggttgacccttggggt

SEQ ID NO: 290947 - DNA, 25 bp, probe
tagattggctgagagccccttctga

SEQ ID NO: 290948 - DNA, 25 bp, probe
tagtgaggctgaccagagccggttg

SEQ ID NO: 290949 - DNA, 25 bp, probe
tatgcagaaggggaggccgaggtgg

SEQ ID NO: 290950 - DNA, 25 bp, probe
tatggcagcggggggcagatgggtg

SEQ ID NO: 290951 - DNA, 25 bp, probe
taggaggagccagggactggggcgg

SEQ ID NO: 290952 - DNA, 25 bp, probe
tagtgaggtggaggtcctgcgggag

SEQ ID NO: 290953 - DNA, 25 bp, probe
tagtgagagtcatcgggcgtggaag

SEQ ID NO: 290954 - DNA, 25 bp, probe
taggactgccatggcggatgctgag

SEQ ID NO: 290955 - DNA, 25 bp, probe
tagtccatgtgatgcgcacattagc

SEQ ID NO: 290956 - DNA, 25 bp, probe
tagtccagtgatgtccatgtcagac

SEQ ID NO: 290957 - DNA, 25 bp, probe
tagtctgcagtgacctcaacaagac

SEQ ID NO: 290958 - DNA, 25 bp, probe
tagtggcagtgcagcaaccagagca

SEQ ID NO: 290959 - DNA, 25 bp, probe
taggtgaggcatgctgaccacaatg

SEQ ID NO: 290960 - DNA, 25 bp, probe
taggtgaggcatgctgaccacaatg

SEQ ID NO: 290961 - DNA, 25 bp, probe
tagggctgcagcactgatgcccagg

SEQ ID NO: 290962 - DNA, 25 bp, probe
tagggctgtggagtgaggccagtaa

SEQ ID NO: 290963 - DNA, 25 bp, probe
tagggctgtgggtgctggagcccac

SEQ ID NO: 290964 - DNA, 25 bp, probe
taggtctggactttgtggactcgca

SEQ ID NO: 290965 - DNA, 25 bp, probe
tatttctggattgtgtgctcctcgt

SEQ ID NO: 290966 - DNA, 25 bp, probe
tatgcttcaggcatggtgccggcct

SEQ ID NO: 290967 - DNA, 25 bp, probe
tatggataggctgggcctgggcact

SEQ ID NO: 290968 - DNA, 25 bp, probe
tatggtgagcccagcgtgggcaccg

SEQ ID NO: 290969 - DNA, 25 bp, probe
tatgggatcgtcatgtgggaagtca

SEQ ID NO: 290970 - DNA, 25 bp, probe
tatggaggaagcatggaagaaatga

SEQ ID NO: 290971 - DNA, 25 bp, probe
tagggagaagtctgcaagatgtcaa

SEQ ID NO: 290972 - DNA, 25 bp, probe
tagggagaagtctgcaagatgtcaa

SEQ ID NO: 290973 - DNA, 25 bp, probe
tatgtgggaactttgcctgttgcaa

SEQ ID NO: 290974 - DNA, 25 bp, probe
tagttgtgaacattgcttgtgtgtg

SEQ ID NO: 290975 - DNA, 25 bp, probe
tagttgatgaatttgctatgcgtta

SEQ ID NO: 290976 - DNA, 25 bp, probe
tatgctgtcatgattgtgctacagt

SEQ ID NO: 290977 - DNA, 25 bp, probe
tagtgttgatgattggtgacatagt

SEQ ID NO: 290978 - DNA, 25 bp, probe
tagtgatggcaaaggcgatattata

SEQ ID NO: 290979 - DNA, 25 bp, probe
tagtatcacaaatctgtagtagcat

SEQ ID NO: 290980 - DNA, 25 bp, probe
tatgaatacaaatcgaaggcctcta

SEQ ID NO: 290981 - DNA, 25 bp, probe
tagtatacaatattggggacaccaa

SEQ ID NO: 290982 - DNA, 25 bp, probe
tatggtgacttttagggagcacaaa

SEQ ID NO: 290983 - DNA, 25 bp, probe
tatagtgttcatcaaagtgccataa

SEQ ID NO: 290984 - DNA, 25 bp, probe
tatcgtttacaaaaggttacagaga

SEQ ID NO: 290985 - DNA, 25 bp, probe
tatcgtttccaaacagcatgctcga

SEQ ID NO: 290986 - DNA, 25 bp, probe
taggcttgtctatagcaaccataat

SEQ ID NO: 290987 - DNA, 25 bp, probe
tagtccaactaatgcagtcgataca

SEQ ID NO: 290988 - DNA, 25 bp, probe
tagtaacaggaactgaggcgataga

SEQ ID NO: 290989 - DNA, 25 bp, probe
tatgtctacagacctggagggaaca

SEQ ID NO: 290990 - DNA, 25 bp, probe
tagtcagtatagttgggaggcacca

SEQ ID NO: 290991 - DNA, 25 bp, probe
tagtttagaataagtgcattgccca

SEQ ID NO: 290992 - DNA, 25 bp, probe
tatgtttcacaaccagcatcatccc

SEQ ID NO: 290993 - DNA, 25 bp, probe
tatgagtgtagagcccatatcccca

SEQ ID NO: 290994 - DNA, 25 bp, probe
tatgggtcagagttccgactgccat

SEQ ID NO: 290995 - DNA, 25 bp, probe
tttggaatgaccagagacatctatg

SEQ ID NO: 290996 - DNA, 25 bp, probe
tatagtgaacccagagaagccttct

SEQ ID NO: 290997 - DNA, 25 bp, probe
tatcgagacagccacagtagaagcg

SEQ ID NO: 290998 - DNA, 25 bp, probe
tatggagatattacagtggaactga

SEQ ID NO: 290999 - DNA, 25 bp, probe
tatggagatattacagtggaactga

SEQ ID NO: 291000 - DNA, 25 bp, probe
tatggacatagcacagatgaaccaa

SEQ ID NO: 291001 - DNA, 25 bp, probe
tatggactctgcacatgaatcccac

SEQ ID NO: 291002 - DNA, 25 bp, probe
tatggactctgcacatgaatcccac

SEQ ID NO: 291003 - DNA, 25 bp, probe
tagtgaccgattacacacaccatcc

SEQ ID NO: 291004 - DNA, 25 bp, probe
tagtcacacttttcagaccaattca

SEQ ID NO: 291005 - DNA, 25 bp, probe
tagtactctttgtagcaaaattctt

SEQ ID NO: 291006 - DNA, 25 bp, probe
tagtactctttgtagcaaaattctt

SEQ ID NO: 291007 - DNA, 25 bp, probe
tagtgacttttgccccatagttggg

SEQ ID NO: 291008 - DNA, 25 bp, probe
tatggacttacctcaatcagattgt

SEQ ID NO: 291009 - DNA, 25 bp, probe
tatgagtccattccccactagaatg

SEQ ID NO: 291010 - DNA, 25 bp, probe
tatgagtccattccccactagaatg

SEQ ID NO: 291011 - DNA, 25 bp, probe
tatggttcttcagtcgatatatggg

SEQ ID NO: 291012 - DNA, 25 bp, probe
tatgccttcaatactcgcaagtgcc

SEQ ID NO: 291013 - DNA, 25 bp, probe
tatccttcagatccaatcaagggaa

SEQ ID NO: 291014 - DNA, 25 bp, probe
tatgctattctttgcaaaagggaag

SEQ ID NO: 291015 - DNA, 25 bp, probe
tagtgttctgtgtcaaagaagtgca

SEQ ID NO: 291016 - DNA, 25 bp, probe
tatgagttctgctacaaggtggtgc

SEQ ID NO: 291017 - DNA, 25 bp, probe
tatggactgcatggacaatgagagg

SEQ ID NO: 291018 - DNA, 25 bp, probe
tatggactcatccaccaggggatga

SEQ ID NO: 291019 - DNA, 25 bp, probe
tagtgattgatcctgacaagcggat

SEQ ID NO: 291020 - DNA, 25 bp, probe
tatgtgatgactgtgacggggctag

SEQ ID NO: 291021 - DNA, 25 bp, probe
tatgctgcaactcatgaacttggcc

SEQ ID NO: 291022 - DNA, 25 bp, probe
tatgctgcaggtggagaaattttca

SEQ ID NO: 291023 - DNA, 25 bp, probe
tagtcttggcagaagaattcattga

SEQ ID NO: 291024 - DNA, 25 bp, probe
tagtttctcactaggcatgtcttgg

SEQ ID NO: 291025 - DNA, 25 bp, probe
tagtatttactgatgcattatgctg

SEQ ID NO: 291026 - DNA, 25 bp, probe
tagtatttactgatgcattatgctg

SEQ ID NO: 291027 - DNA, 25 bp, probe
tagtattatacgaattttgctgcag

SEQ ID NO: 291028 - DNA, 25 bp, probe
tagtattatacgaattttgctgcag

SEQ ID NO: 291029 - DNA, 25 bp, probe
tagtatgctacctcttctattgaag

SEQ ID NO: 291030 - DNA, 25 bp, probe
tagtcatgtgaccactctgtcttgt

SEQ ID NO: 291031 - DNA, 25 bp, probe
tagtcagtcatctactaatacattt

SEQ ID NO: 291032 - DNA, 25 bp, probe
taggatgttgcttctgaatcactgt

SEQ ID NO: 291033 - DNA, 25 bp, probe
taggagatgcgatggactcactgca

SEQ ID NO: 291034 - DNA, 25 bp, probe
tagggagagcaagtcattcacgcgc

SEQ ID NO: 291035 - DNA, 25 bp, probe
taggtcagaggatcagtaacagcaa

SEQ ID NO: 291036 - DNA, 25 bp, probe
tatggccagggcaggagtacacaga

SEQ ID NO: 291037 - DNA, 25 bp, probe
tatgaccaagcgggggtcccaggtg

SEQ ID NO: 291038 - DNA, 25 bp, probe
tatgaccaagcgggggtcccaggtg

SEQ ID NO: 291039 - DNA, 25 bp, probe
tatgaaaagagtgatggttcctggg

SEQ ID NO: 291040 - DNA, 25 bp, probe
tatcaagaatgggtcaggagaccgc

SEQ ID NO: 291041 - DNA, 25 bp, probe
tatacagccaggtgggaagcagctc

SEQ ID NO: 291042 - DNA, 25 bp, probe
tattccgaaaggggcacaggcatgc

SEQ ID NO: 291043 - DNA, 25 bp, probe
tattccgaaaggggcacaggcatgc

SEQ ID NO: 291044 - DNA, 25 bp, probe
tatgatgcccagttggaagaaagag

SEQ ID NO: 291045 - DNA, 25 bp, probe
tatatgccaccagaagcaatcaaag

SEQ ID NO: 291046 - DNA, 25 bp, probe
tataaaggagaataccacagagctc

SEQ ID NO: 291047 - DNA, 25 bp, probe
ttgaccaggaaacagtgatcaaccc

SEQ ID NO: 291048 - DNA, 25 bp, probe
tataccggggaatgtgtagccttca

SEQ ID NO: 291049 - DNA, 25 bp, probe
tatattctggggcttggagaccgtc

SEQ ID NO: 291050 - DNA, 25 bp, probe
tatttctgttggttagtagacacta

SEQ ID NO: 291051 - DNA, 25 bp, probe
tatgttccttcgttcagctgagatt

SEQ ID NO: 291052 - DNA, 25 bp, probe
tagtccctctgtttcgcacagagta

SEQ ID NO: 291053 - DNA, 25 bp, probe
tagtctgttcttttggatagcatga

SEQ ID NO: 291054 - DNA, 25 bp, probe
tagggaacttgaatgctgcaacaga

SEQ ID NO: 291055 - DNA, 25 bp, probe
tagggaacttgaatgctgcaacaga

SEQ ID NO: 291056 - DNA, 25 bp, probe
tatccgaactggacatatgcctcga

SEQ ID NO: 291057 - DNA, 25 bp, probe
tatccgaactggacatatgcctcga

SEQ ID NO: 291058 - DNA, 25 bp, probe
tatctacagcaccgactattaccgt

SEQ ID NO: 291059 - DNA, 25 bp, probe
tatcaaacccagacttgcttccata

SEQ ID NO: 291060 - DNA, 25 bp, probe
tatggacggccagctgtggcccata

SEQ ID NO: 291061 - DNA, 25 bp, probe
tatggcaccctcagttgggtctact

SEQ ID NO: 291062 - DNA, 25 bp, probe
tatggcaccctcagttgggtctact

SEQ ID NO: 291063 - DNA, 25 bp, probe
tatacccatctctgatttggctctc

SEQ ID NO: 291064 - DNA, 25 bp, probe
tatactccattctttggtcgtcgtc

SEQ ID NO: 291065 - DNA, 25 bp, probe
tatttgcctctactacgtcaggcag

SEQ ID NO: 291066 - DNA, 25 bp, probe
tatcttacgctatttctgttggtta

SEQ ID NO: 291067 - DNA, 25 bp, probe
tatgccccacctatctttggtatat

SEQ ID NO: 291068 - DNA, 25 bp, probe
tatggtccccgtagctattttaata

SEQ ID NO: 291069 - DNA, 25 bp, probe
tatggtccccgtagctattttaata

SEQ ID NO: 291070 - DNA, 25 bp, probe
taggtctctgtccattgcttttaat

SEQ ID NO: 291071 - DNA, 25 bp, probe
taggaatcattcttctcttgctgta

SEQ ID NO: 291072 - DNA, 25 bp, probe
tagtggtcttgcacatttgcacata

SEQ ID NO: 291073 - DNA, 25 bp, probe
taggttgctatggttttatctaaca

SEQ ID NO: 291074 - DNA, 25 bp, probe
tatggatcccaattcatttcatcta

SEQ ID NO: 291075 - DNA, 25 bp, probe
taggcatctgaaacttgcttcatct

SEQ ID NO: 291076 - DNA, 25 bp, probe
taggtgctacagagtgtctccttct

SEQ ID NO: 291077 - DNA, 25 bp, probe
tatggagtacagctgtctggcctcc

SEQ ID NO: 291078 - DNA, 25 bp, probe
tatggaggacgttcttacactccca

SEQ ID NO: 291079 - DNA, 25 bp, probe
tatgggaagccatattcacacctca

SEQ ID NO: 291080 - DNA, 25 bp, probe
tagggaggttaaggcacacctgctg

SEQ ID NO: 291081 - DNA, 25 bp, probe
taggtgagagtcagggtgcagggtg

SEQ ID NO: 291082 - DNA, 25 bp, probe
taggtgtgtggctgcggtgaggagc

SEQ ID NO: 291083 - DNA, 25 bp, probe
tagtgatggggctcagatggactgg

SEQ ID NO: 291084 - DNA, 25 bp, probe
tagtactgcaactgccagaacttgg

SEQ ID NO: 291085 - DNA, 25 bp, probe
tagtcactagtattgctaatttttg

SEQ ID NO: 291086 - DNA, 25 bp, probe
tatgtagttgaattcatcaatcttt

SEQ ID NO: 291087 - DNA, 25 bp, probe
tagtcattgctgtttcatctactgt

SEQ ID NO: 291088 - DNA, 25 bp, probe
taggcagggtgtacagctagctgtt

SEQ ID NO: 291089 - DNA, 25 bp, probe
taggcatggagaaaattacttgtta

SEQ ID NO: 291090 - DNA, 25 bp, probe
taggcagtgcataaagtatttttca

SEQ ID NO: 291091 - DNA, 25 bp, probe
tagtcagtcttcaggatgtgcttat

SEQ ID NO: 291092 - DNA, 25 bp, probe
tagtcttattcggtgatgactcttg

SEQ ID NO: 291093 - DNA, 25 bp, probe
tatgctgcatgttttggaagacctc

SEQ ID NO: 291094 - DNA, 25 bp, probe
tatgctcatgcagtgcttggacagc

SEQ ID NO: 291095 - DNA, 25 bp, probe
taggcagcagtgttgcagcaacctg

SEQ ID NO: 291096 - DNA, 25 bp, probe
tagtgaactgcttgaaactctgctg

SEQ ID NO: 291097 - DNA, 25 bp, probe
tatggagaagttcaacttgctgtaa

SEQ ID NO: 291098 - DNA, 25 bp, probe
tatggaatgtctgtaaattctaata

SEQ ID NO: 291099 - DNA, 25 bp, probe
taggatattgctcaaaattatataa

SEQ ID NO: 291100 - DNA, 25 bp, probe
tagtgtttggtggcacattctaaaa

SEQ ID NO: 291101 - DNA, 25 bp, probe
taggtttggtgcttatcttctaata

SEQ ID NO: 291102 - DNA, 25 bp, probe
taggttgtttctaattttcattatt

SEQ ID NO: 291103 - DNA, 25 bp, probe
tagtgcctgtttattcttactccat

SEQ ID NO: 291104 - DNA, 25 bp, probe
tagtccaccttcatttaactctttg

SEQ ID NO: 291105 - DNA, 25 bp, probe
tagtgtcatcactcttttaagatct

SEQ ID NO: 291106 - DNA, 25 bp, probe
tagtggcattctacttattaagatg

SEQ ID NO: 291107 - DNA, 25 bp, probe
tatgcaactgtccacttaataagga

SEQ ID NO: 291108 - DNA, 25 bp, probe
tatagtagttcagtcataaaaaaaa

SEQ ID NO: 291109 - DNA, 25 bp, probe
tatcagtacgtcggcaatggaagaa

SEQ ID NO: 291110 - DNA, 25 bp, probe
ttggcaagggttcctacgcaaaagt

SEQ ID NO: 291111 - DNA, 25 bp, probe
tttgaaagagttctcctcataggag

SEQ ID NO: 291112 - DNA, 25 bp, probe
tagtgacagggtggcagtcccatag

SEQ ID NO: 291113 - DNA, 25 bp, probe
taggacaccagtgggtcctcactgc

SEQ ID NO: 291114 - DNA, 25 bp, probe
tagtgagcctactggctcctggcag

SEQ ID NO: 291115 - DNA, 25 bp, probe
tattgtggatactggcccttggtgt

SEQ ID NO: 291116 - DNA, 25 bp, probe
tagtgctggaacggtacctgtggct

SEQ ID NO: 291117 - DNA, 25 bp, probe
tagtgctggaacggtacctgtggct

SEQ ID NO: 291118 - DNA, 25 bp, probe
tagtgcttgtactgttttgctggat

SEQ ID NO: 291119 - DNA, 25 bp, probe
tatgattttgactaccttatctggt

SEQ ID NO: 291120 - DNA, 25 bp, probe
tattgtcgtggcagcctttcttgtc

SEQ ID NO: 291121 - DNA, 25 bp, probe
tagtgctcttggtgtatattcttac

SEQ ID NO: 291122 - DNA, 25 bp, probe
taggttctgagctgaactgtttatc

SEQ ID NO: 291123 - DNA, 25 bp, probe
taggttctgagctgaactgtttatc

SEQ ID NO: 291124 - DNA, 25 bp, probe
taggcatgtttctgatcctggtctt

SEQ ID NO: 291125 - DNA, 25 bp, probe
tagtcatgttcttggttctgtcttc

SEQ ID NO: 291126 - DNA, 25 bp, probe
tagtgcatcttcatggtgtctgatt

SEQ ID NO: 291127 - DNA, 25 bp, probe
tatgtgcagttcaagtttcacatct

SEQ ID NO: 291128 - DNA, 25 bp, probe
tatggcagcgccatctttacatatg

SEQ ID NO: 291129 - DNA, 25 bp, probe
tatgtagatgccactttaagcttta

SEQ ID NO: 291130 - DNA, 25 bp, probe
tatgtagatgccactttaagcttta

SEQ ID NO: 291131 - DNA, 25 bp, probe
tattcatacagcactacttacttag

SEQ ID NO: 291132 - DNA, 25 bp, probe
tattcatacagcactacttacttag

SEQ ID NO: 291133 - DNA, 25 bp, probe
tatgtctacacgctcaccgtgtttg

SEQ ID NO: 291134 - DNA, 25 bp, probe
ttgtcctatgcacatcctttaactg

SEQ ID NO: 291135 - DNA, 25 bp, probe
tatgtccttaggtcctggtctacat

SEQ ID NO: 291136 - DNA, 25 bp, probe
tatccctgtaagtgcgcagacacca

SEQ ID NO: 291137 - DNA, 25 bp, probe
tatccctgtaagtgcgcagacacca

SEQ ID NO: 291138 - DNA, 25 bp, probe
tatccctgtaagtgcgcagacacca

SEQ ID NO: 291139 - DNA, 25 bp, probe
tatccctttgtggaaggcactacac

SEQ ID NO: 291140 - DNA, 25 bp, probe
tatcctattctacaagtcagtaaag

SEQ ID NO: 291141 - DNA, 25 bp, probe
tatcctggattctgaactcttcaat

SEQ ID NO: 291142 - DNA, 25 bp, probe
tatcctggattctgaactcttcaat

SEQ ID NO: 291143 - DNA, 25 bp, probe
tatccggataatccaacccctgaga

SEQ ID NO: 291144 - DNA, 25 bp, probe
ttctcggtactatagggcaccagag

SEQ ID NO: 291145 - DNA, 25 bp, probe
tatcgggaaccatttgtgcaacgac

SEQ ID NO: 291146 - DNA, 25 bp, probe
tagggagaaccatcatttcacagtt

SEQ ID NO: 291147 - DNA, 25 bp, probe
taggagagaggttaatgttactttt

SEQ ID NO: 291148 - DNA, 25 bp, probe
taggaggatgtatattttgacttgt

SEQ ID NO: 291149 - DNA, 25 bp, probe
taggatttttgcttttgtgattttt

SEQ ID NO: 291150 - DNA, 25 bp, probe
tagtgttcaatttttttattattat

SEQ ID NO: 291151 - DNA, 25 bp, probe
tatgtgtgtcagtgagtttttcatt

SEQ ID NO: 291152 - DNA, 25 bp, probe
tagtgagctaaaggctttgtctgca

SEQ ID NO: 291153 - DNA, 25 bp, probe
tagtgagggactgtgttgactgacg

SEQ ID NO: 291154 - DNA, 25 bp, probe
tagtgaagatgaatcctgtgtgcca

SEQ ID NO: 291155 - DNA, 25 bp, probe
tagtcctgatgaaacgtctgctcct

SEQ ID NO: 291156 - DNA, 25 bp, probe
tagtctcttgaaactggctgctggc

SEQ ID NO: 291157 - DNA, 25 bp, probe
taggctctatgttttggcttctgca

SEQ ID NO: 291158 - DNA, 25 bp, probe
tagtgagaatgtgccgtgccttcaa

SEQ ID NO: 291159 - DNA, 25 bp, probe
tagtgagtggtcaccaggcttgcaa

SEQ ID NO: 291160 - DNA, 25 bp, probe
tagggcttggctgtaggtgtgcact

SEQ ID NO: 291161 - DNA, 25 bp, probe
taggatgtatggtgtaggtgtggac

SEQ ID NO: 291162 - DNA, 25 bp, probe
tatggagttgtgtataagggtagac

SEQ ID NO: 291163 - DNA, 25 bp, probe
tagtggtgtttttagatggcacagt

SEQ ID NO: 291164 - DNA, 25 bp, probe
tagtgtttttgttgagtctgccatt

SEQ ID NO: 291165 - DNA, 25 bp, probe
tagtgtcttatttagatgctgtgaa

SEQ ID NO: 291166 - DNA, 25 bp, probe
tatgatgtcctcatagaaggtgaac

SEQ ID NO: 291167 - DNA, 25 bp, probe
tatgaactgctgagaggccggagac

SEQ ID NO: 291168 - DNA, 25 bp, probe
tatgcaactctgacgttgatcccag

SEQ ID NO: 291169 - DNA, 25 bp, probe
tatgcaccactgagcaggaccagca

SEQ ID NO: 291170 - DNA, 25 bp, probe
tatgagagcctgttgagggcttcaa

SEQ ID NO: 291171 - DNA, 25 bp, probe
tatgggcttatgtcaattcattgga

SEQ ID NO: 291172 - DNA, 25 bp, probe
tatggctcttcataattctaagact

SEQ ID NO: 291173 - DNA, 25 bp, probe
tatgagctcacctacaacctagaga

SEQ ID NO: 291174 - DNA, 25 bp, probe
tatggcacaccagcataccgtgccc

SEQ ID NO: 291175 - DNA, 25 bp, probe
tatggacctgcagtcgactggtggg

SEQ ID NO: 291176 - DNA, 25 bp, probe
tatggacctgcagtcgactggtggg

SEQ ID NO: 291177 - DNA, 25 bp, probe
taggtctctgttgactggctgtgtg

SEQ ID NO: 291178 - DNA, 25 bp, probe
tatggttatgtgtgccaggctggct

SEQ ID NO: 291179 - DNA, 25 bp, probe
tagtgcttattcaccactgctggtg

SEQ ID NO: 291180 - DNA, 25 bp, probe
tagtcctcttagtcacacagcgagt

SEQ ID NO: 291181 - DNA, 25 bp, probe
taggatctttgaccagcactgttta

SEQ ID NO: 291182 - DNA, 25 bp, probe
tagtgagttctaccaatgtattgtc

SEQ ID NO: 291183 - DNA, 25 bp, probe
taggcagttcaaagcaggatatgtt

SEQ ID NO: 291184 - DNA, 25 bp, probe
taggctgttgcaggacagtggttat

SEQ ID NO: 291185 - DNA, 25 bp, probe
tagtgctgcttctgaagttatctct

SEQ ID NO: 291186 - DNA, 25 bp, probe
tagtgcacgctctgatcaggggtgc

SEQ ID NO: 291187 - DNA, 25 bp, probe
tagtgcagttcaccatgagggaaga

SEQ ID NO: 291188 - DNA, 25 bp, probe
taggccttctgaggaggcgatcagg

SEQ ID NO: 291189 - DNA, 25 bp, probe
tagtgccaactgaagtgccgactgg

SEQ ID NO: 291190 - DNA, 25 bp, probe
tagtgccagaggcaccctgacatca

SEQ ID NO: 291191 - DNA, 25 bp, probe
tagtgcccagggcccaagagactta

SEQ ID NO: 291192 - DNA, 25 bp, probe
taggcccagtcgaagaatatcagct

SEQ ID NO: 291193 - DNA, 25 bp, probe
taggcaccatatttgctgaactagc

SEQ ID NO: 291194 - DNA, 25 bp, probe
tatgtctccatattactgtttcatg

SEQ ID NO: 291195 - DNA, 25 bp, probe
tatgtctccatattactgtttcatg

SEQ ID NO: 291196 - DNA, 25 bp, probe
tatgctatgacaaataccctttaga

SEQ ID NO: 291197 - DNA, 25 bp, probe
tatgtgctacagctgacccagttgt

SEQ ID NO: 291198 - DNA, 25 bp, probe
tatgtgctacagctgacccagttgt

SEQ ID NO: 291199 - DNA, 25 bp, probe
tatgttcacagagtgggcagggctg

SEQ ID NO: 291200 - DNA, 25 bp, probe
tatgtctcagcatccaggagggctt

SEQ ID NO: 291201 - DNA, 25 bp, probe
tatgtgctcatctcctaagtagctc

SEQ ID NO: 291202 - DNA, 25 bp, probe
tatggtaacacctaactgagcctca

SEQ ID NO: 291203 - DNA, 25 bp, probe
tatggctcaaccagccatctacttc

SEQ ID NO: 291204 - DNA, 25 bp, probe
tatggccaaccttgccatctggcat

SEQ ID NO: 291205 - DNA, 25 bp, probe
taggtgacctgcttggatctagaca

SEQ ID NO: 291206 - DNA, 25 bp, probe
tagtggactctcactgtctaggagc

SEQ ID NO: 291207 - DNA, 25 bp, probe
tagggagccgcaccttgtcatgtac

SEQ ID NO: 291208 - DNA, 25 bp, probe
tagggagccgcaccttgtcatgtac

SEQ ID NO: 291209 - DNA, 25 bp, probe
taggagagtcgtgctgctgtctaga

SEQ ID NO: 291210 - DNA, 25 bp, probe
taggaagaggtctgatgacatcatg

SEQ ID NO: 291211 - DNA, 25 bp, probe
taggaaagtacttgcatgatcttac

SEQ ID NO: 291212 - DNA, 25 bp, probe
taggaaagtacttgcatgatcttac

SEQ ID NO: 291213 - DNA, 25 bp, probe
tagtggacagaacatgctgtgttcc

SEQ ID NO: 291214 - DNA, 25 bp, probe
tatgtggactgaaccgacttttcta

SEQ ID NO: 291215 - DNA, 25 bp, probe
tagggacattcaatctagtctttta

SEQ ID NO: 291216 - DNA, 25 bp, probe
tatgctggacattaacaagatcatt

SEQ ID NO: 291217 - DNA, 25 bp, probe
tatgcagcgacaaagaaaacttcct

SEQ ID NO: 291218 - DNA, 25 bp, probe
tatgaaagcccaaatcacctgtact

SEQ ID NO: 291219 - DNA, 25 bp, probe
tatgaaagccaaatatacagcctta

SEQ ID NO: 291220 - DNA, 25 bp, probe
tatgataacaacagcagcaccctgg

SEQ ID NO: 291221 - DNA, 25 bp, probe
taggaacatacttcagctcacacat

SEQ ID NO: 291222 - DNA, 25 bp, probe
taggagcatcacctccagtgactca

SEQ ID NO: 291223 - DNA, 25 bp, probe
tatggcagaagcctttgtgatctca

SEQ ID NO: 291224 - DNA, 25 bp, probe
tatgtcaaggtgtacatgtaccagc

SEQ ID NO: 291225 - DNA, 25 bp, probe
tatgccaaggtgaagcttatcccac

SEQ ID NO: 291226 - DNA, 25 bp, probe
tatgggcaggatgcagctttcaccg

SEQ ID NO: 291227 - DNA, 25 bp, probe
tagggggacagagtagaaactggag

SEQ ID NO: 291228 - DNA, 25 bp, probe
tagggggacagagtagaaactggag

SEQ ID NO: 291229 - DNA, 25 bp, probe
tagggctgcgaatctagaggagggg

SEQ ID NO: 291230 - DNA, 25 bp, probe
tagggctggagaccacgggaggaag

SEQ ID NO: 291231 - DNA, 25 bp, probe
tatgagggagaccccgacagaggac

SEQ ID NO: 291232 - DNA, 25 bp, probe
tatgagaggaacgggagatatgagg

SEQ ID NO: 291233 - DNA, 25 bp, probe
tatgatctgtgctgggggtgatggc

SEQ ID NO: 291234 - DNA, 25 bp, probe
tatatcttcaggcgcgcggtctggc

SEQ ID NO: 291235 - DNA, 25 bp, probe
tatgaatgctcccttcgggactgtc

SEQ ID NO: 291236 - DNA, 25 bp, probe
tttcgatcctcgtcaggtgcaggtc

SEQ ID NO: 291237 - DNA, 25 bp, probe
tatgtcgtgcctgcagggacacgtc

SEQ ID NO: 291238 - DNA, 25 bp, probe
tatgatgggccccagtggacatgtg

SEQ ID NO: 291239 - DNA, 25 bp, probe
tatgggtggcaccatgtggactttt

SEQ ID NO: 291240 - DNA, 25 bp, probe
tatgggtgtgccctgcagttttatt

SEQ ID NO: 291241 - DNA, 25 bp, probe
tatgtgtggtgacttgcggatttat

SEQ ID NO: 291242 - DNA, 25 bp, probe
tatgggtttgctttggtgttgtttt

SEQ ID NO: 291243 - DNA, 25 bp, probe
tatgggtttgctttggtgttgtttt

SEQ ID NO: 291244 - DNA, 25 bp, probe
tatggttttgctttttgattcttgt

SEQ ID NO: 291245 - DNA, 25 bp, probe
tatgggtattacctttgtctcttca

SEQ ID NO: 291246 - DNA, 25 bp, probe
tagtggtctgtgtttcttttcgcca

SEQ ID NO: 291247 - DNA, 25 bp, probe
tagtggttgtcaactcatttctctc

SEQ ID NO: 291248 - DNA, 25 bp, probe
tagggcttcacatggcatttgtctg

SEQ ID NO: 291249 - DNA, 25 bp, probe
taggcgcttcaggcggagttggtac

SEQ ID NO: 291250 - DNA, 25 bp, probe
taggatgttcaggcaggcccaggct

SEQ ID NO: 291251 - DNA, 25 bp, probe
tatggtgtccagtggcatccagaga

SEQ ID NO: 291252 - DNA, 25 bp, probe
tatggagtccagtctaagcagagag

SEQ ID NO: 291253 - DNA, 25 bp, probe
tatgacagtgaaccgaagcgcaatg

SEQ ID NO: 291254 - DNA, 25 bp, probe
tatccttgagacagccaccaatggc

SEQ ID NO: 291255 - DNA, 25 bp, probe
tatccgttggatgccaccagagtcc

SEQ ID NO: 291256 - DNA, 25 bp, probe
tatccagtctgtgccaactgaagta

SEQ ID NO: 291257 - DNA, 25 bp, probe
tatagcacttatcactagctgaagt

SEQ ID NO: 291258 - DNA, 25 bp, probe
tataatcccagctactcaggaggct

SEQ ID NO: 291259 - DNA, 25 bp, probe
tataaattgcgctctcagctgtggg

SEQ ID NO: 291260 - DNA, 25 bp, probe
tatcccttgccttaggcttgtggcc

SEQ ID NO: 291261 - DNA, 25 bp, probe
tatcctgcttctgatatgcagtttt

SEQ ID NO: 291262 - DNA, 25 bp, probe
tattctgctccttaaggttaacaat

SEQ ID NO: 291263 - DNA, 25 bp, probe
tatacagccctttcggttatgaagt

SEQ ID NO: 291264 - DNA, 25 bp, probe
tataaggctcttgcactgtgacaga

SEQ ID NO: 291265 - DNA, 25 bp, probe
tataaggcgtcagactggagaggcc

SEQ ID NO: 291266 - DNA, 25 bp, probe
tatcggccttcccttggagagggcc

SEQ ID NO: 291267 - DNA, 25 bp, probe
ttcggccttccgtgatggaaaccac

SEQ ID NO: 291268 - DNA, 25 bp, probe
tttgttcctggctttcagaaaacca

SEQ ID NO: 291269 - DNA, 25 bp, probe
tattttctgggctcttgcaagtcac

SEQ ID NO: 291270 - DNA, 25 bp, probe
tatgtcttcgtgggggtcaagttcc

SEQ ID NO: 291271 - DNA, 25 bp, probe
tatgtcttcgtgggggtcaagttcc

SEQ ID NO: 291272 - DNA, 25 bp, probe
tattactcagaaggggtaatgctcc

SEQ ID NO: 291273 - DNA, 25 bp, probe
tattcagtaaacaggctgcctctcc

SEQ ID NO: 291274 - DNA, 25 bp, probe
tattcagggaacacgatggacctca

SEQ ID NO: 291275 - DNA, 25 bp, probe
tattcagcccatcacgctgtggttt

SEQ ID NO: 291276 - DNA, 25 bp, probe
tatctactggatttccgtagtattg

SEQ ID NO: 291277 - DNA, 25 bp, probe
tattttagtatcccagtcaggaatt

SEQ ID NO: 291278 - DNA, 25 bp, probe
tattatctgaactggactagtgaaa

SEQ ID NO: 291279 - DNA, 25 bp, probe
tatgtatctcataattgggctagaa

SEQ ID NO: 291280 - DNA, 25 bp, probe
tatgtgcatcgtgatctggccgcac

SEQ ID NO: 291281 - DNA, 25 bp, probe
tatgtcacagctaaggagcatgccc

SEQ ID NO: 291282 - DNA, 25 bp, probe
tatgagacctatcagagcagccggc

SEQ ID NO: 291283 - DNA, 25 bp, probe
tatgacccgacggatgagccagtgg

SEQ ID NO: 291284 - DNA, 25 bp, probe
tatgctggggactattaccgtgtgc

SEQ ID NO: 291285 - DNA, 25 bp, probe
tatatggccggatctaccgggctgc

SEQ ID NO: 291286 - DNA, 25 bp, probe
tattgacagggatcacactggggcc

SEQ ID NO: 291287 - DNA, 25 bp, probe
tattatcgggaaccatttgtgcaac

SEQ ID NO: 291288 - DNA, 25 bp, probe
tatccagcgggaactcagggtgagc

SEQ ID NO: 291289 - DNA, 25 bp, probe
tatctctctgggacctagggggacg

SEQ ID NO: 291290 - DNA, 25 bp, probe
tatcctgcatggtatcactaaaggt

SEQ ID NO: 291291 - DNA, 25 bp, probe
taggctcggatcagctgctacagga

SEQ ID NO: 291292 - DNA, 25 bp, probe
taggcatcaccacggtgctgacgat

SEQ ID NO: 291293 - DNA, 25 bp, probe
taggcataacactgctgctcattta

SEQ ID NO: 291294 - DNA, 25 bp, probe
tatctgcagaaatttgctgtcaata

SEQ ID NO: 291295 - DNA, 25 bp, probe
tatctgcagaaatttgctgtcaata

SEQ ID NO: 291296 - DNA, 25 bp, probe
tatgctcatgccaactggaataata

SEQ ID NO: 291297 - DNA, 25 bp, probe
tatgcttccacaggcaaaactcagt

SEQ ID NO: 291298 - DNA, 25 bp, probe
tatcatcttcacttcagacaattca

SEQ ID NO: 291299 - DNA, 25 bp, probe
tatctcattcattacgatttatcag

SEQ ID NO: 291300 - DNA, 25 bp, probe
tatgtttatacaggatctttcagat

SEQ ID NO: 291301 - DNA, 25 bp, probe
ttttaaagcaatcttggcagactaa

SEQ ID NO: 291302 - DNA, 25 bp, probe
ttgttacaggaacactggcaaagcc

SEQ ID NO: 291303 - DNA, 25 bp, probe
ttgttacaggaacactggcaaagcc

SEQ ID NO: 291304 - DNA, 25 bp, probe
tatgttaagtaacactcaaccatca

SEQ ID NO: 291305 - DNA, 25 bp, probe
tatgattatctgaagtccaccaccc

SEQ ID NO: 291306 - DNA, 25 bp, probe
tatgtttcctttgaccaacatcttt

SEQ ID NO: 291307 - DNA, 25 bp, probe
taggattcctttgagtaagacttca

SEQ ID NO: 291308 - DNA, 25 bp, probe
taggttctcggtacttaggacttga

SEQ ID NO: 291309 - DNA, 25 bp, probe
taggatgtggggaagttaggaactg

SEQ ID NO: 291310 - DNA, 25 bp, probe
taggaggggttattgacaggaagga

SEQ ID NO: 291311 - DNA, 25 bp, probe
taggccgaggtaaatacagtgaagt

SEQ ID NO: 291312 - DNA, 25 bp, probe
taggccgaggtaaatacagtgaagt

SEQ ID NO: 291313 - DNA, 25 bp, probe
taggggcagttaaatatcctctact

SEQ ID NO: 291314 - DNA, 25 bp, probe
tatgcagggtttatggtcccatact

SEQ ID NO: 291315 - DNA, 25 bp, probe
tatggaggtgattttgtggccctag

SEQ ID NO: 291316 - DNA, 25 bp, probe
taggagttgacgtctgtgggcacta

SEQ ID NO: 291317 - DNA, 25 bp, probe
tatggatgtgtgggccttgggcgta

SEQ ID NO: 291318 - DNA, 25 bp, probe
tatggatgtgtgggccttgggcgta

SEQ ID NO: 291319 - DNA, 25 bp, probe
tatgggtggttcccatggtggcttc

SEQ ID NO: 291320 - DNA, 25 bp, probe
taggtgggtggccacgtggatgcct

SEQ ID NO: 291321 - DNA, 25 bp, probe
tagggggtggagacactgctacttg

SEQ ID NO: 291322 - DNA, 25 bp, probe
tatgggagagattagacactggagg

SEQ ID NO: 291323 - DNA, 25 bp, probe
tatgtggaagattacgagcagggtc

SEQ ID NO: 291324 - DNA, 25 bp, probe
tatgtggaagattacgagcagggtc

SEQ ID NO: 291325 - DNA, 25 bp, probe
tatgggaaagcatgccacagccact

SEQ ID NO: 291326 - DNA, 25 bp, probe
tatgggaaagcatgccacagccact

SEQ ID NO: 291327 - DNA, 25 bp, probe
tatggtgaacagtgctcttgtggta

SEQ ID NO: 291328 - DNA, 25 bp, probe
tatgggcatacacttccttggccta

SEQ ID NO: 291329 - DNA, 25 bp, probe
tatgggtagcagattttgtggtgat

SEQ ID NO: 291330 - DNA, 25 bp, probe
tatgtggcttttatttcagtgccat

SEQ ID NO: 291331 - DNA, 25 bp, probe
tatgtgggtagtattccagcatcct

SEQ ID NO: 291332 - DNA, 25 bp, probe
tatggggtggtgaccccgatgctca

SEQ ID NO: 291333 - DNA, 25 bp, probe
ttgggggaatgcacctccccaaagc

SEQ ID NO: 291334 - DNA, 25 bp, probe
taggagggacatcacaaccacaaaa

SEQ ID NO: 291335 - DNA, 25 bp, probe
tatggggtgaagaccaaacaaatta

SEQ ID NO: 291336 - DNA, 25 bp, probe
tatgtgtgtgtatgctactacaaaa

SEQ ID NO: 291337 - DNA, 25 bp, probe
tatgtcaacatatgtcactgaaata

SEQ ID NO: 291338 - DNA, 25 bp, probe
tatgtcaacatatgtcactgaaata

SEQ ID NO: 291339 - DNA, 25 bp, probe
tatgtcatggaactgcccaaactaa

SEQ ID NO: 291340 - DNA, 25 bp, probe
taggcagtgaattcacccaccttga

SEQ ID NO: 291341 - DNA, 25 bp, probe
taggcagtattccaaggcactttgc

SEQ ID NO: 291342 - DNA, 25 bp, probe
tatggcagtgtttgaacagcattgt

SEQ ID NO: 291343 - DNA, 25 bp, probe
tatggcctttatcaacagctgtctc

SEQ ID NO: 291344 - DNA, 25 bp, probe
tatggcctttatcaacagctgtctc

SEQ ID NO: 291345 - DNA, 25 bp, probe
tatgtactagtactgtgtactgtat

SEQ ID NO: 291346 - DNA, 25 bp, probe
taggactgttacagctgagcattat

SEQ ID NO: 291347 - DNA, 25 bp, probe
tatggcagcttctacatacgaatta

SEQ ID NO: 291348 - DNA, 25 bp, probe
tatggagtccataaatctgaatcaa

SEQ ID NO: 291349 - DNA, 25 bp, probe
tatgtgattaattatgtgatgaaaa

SEQ ID NO: 291350 - DNA, 25 bp, probe
tatgtgagacgaatgatggctagat

SEQ ID NO: 291351 - DNA, 25 bp, probe
tatgtgatgatggagctatgcctca

SEQ ID NO: 291352 - DNA, 25 bp, probe
tatgatgtcatctgactgctgctac

SEQ ID NO: 291353 - DNA, 25 bp, probe
tatgatgtcatctgactgctgctac

SEQ ID NO: 291354 - DNA, 25 bp, probe
tatatgctcatctgagtgacggata

SEQ ID NO: 291355 - DNA, 25 bp, probe
tatgcatgccaggctgggcacggct

SEQ ID NO: 291356 - DNA, 25 bp, probe
tatagccatggtcctattgcagtcc

SEQ ID NO: 291357 - DNA, 25 bp, probe
tatactcgtgtgctctttgatattc

SEQ ID NO: 291358 - DNA, 25 bp, probe
tatgactatgtggagctctttgatg

SEQ ID NO: 291359 - DNA, 25 bp, probe
tatgctcttgtgtaatctacttgac

SEQ ID NO: 291360 - DNA, 25 bp, probe
tatgcttggctaactatatttgctt

SEQ ID NO: 291361 - DNA, 25 bp, probe
tatgctgggccaactggccattctg

SEQ ID NO: 291362 - DNA, 25 bp, probe
tatgctgggccaactggccattctg

SEQ ID NO: 291363 - DNA, 25 bp, probe
tatgagggctcaagtcgcaatgtat

SEQ ID NO: 291364 - DNA, 25 bp, probe
tatcacaggctcagggcaaagaagt

SEQ ID NO: 291365 - DNA, 25 bp, probe
tatcctggatctggtgttacaatgg

SEQ ID NO: 291366 - DNA, 25 bp, probe
tatgccgagttcttctacaactggt

SEQ ID NO: 291367 - DNA, 25 bp, probe
tatcccaagtgctcttattctggtg

SEQ ID NO: 291368 - DNA, 25 bp, probe
tatccaaggtgctgaatcttggagg

SEQ ID NO: 291369 - DNA, 25 bp, probe
tatctcaataaccaggtcatcaggg

SEQ ID NO: 291370 - DNA, 25 bp, probe
tatccaaaatggccgtgcaagctta

SEQ ID NO: 291371 - DNA, 25 bp, probe
tatcaaaactggcagtggggcagca

SEQ ID NO: 291372 - DNA, 25 bp, probe
tatcaaaactggcagtggggcagca

SEQ ID NO: 291373 - DNA, 25 bp, probe
ttcaacaaattctgggggacaatat

SEQ ID NO: 291374 - DNA, 25 bp, probe
tatgcacaaaattcccgtgggccta

SEQ ID NO: 291375 - DNA, 25 bp, probe
tatgaccaaatctccgataagacag

SEQ ID NO: 291376 - DNA, 25 bp, probe
tatgacaaaacgccgctggagaagg

SEQ ID NO: 291377 - DNA, 25 bp, probe
tataagataacccagcagcaaaagg

SEQ ID NO: 291378 - DNA, 25 bp, probe
tatgggatagaaatggcagcaaaat

SEQ ID NO: 291379 - DNA, 25 bp, probe
tatgcgttatggaattgaatccatt

SEQ ID NO: 291380 - DNA, 25 bp, probe
tatgagttatgtgcattaatgcctc

SEQ ID NO: 291381 - DNA, 25 bp, probe
tatggttcatctgtcacaagcctgt

SEQ ID NO: 291382 - DNA, 25 bp, probe
taggtgtgcatcgctgtgtagtgtg

SEQ ID NO: 291383 - DNA, 25 bp, probe
taggatctgatcccagttttctgga

SEQ ID NO: 291384 - DNA, 25 bp, probe
tatggtcgttactattttcagtttt

SEQ ID NO: 291385 - DNA, 25 bp, probe
taggactgtgtagttgtatatttgt

SEQ ID NO: 291386 - DNA, 25 bp, probe
taggaattctcagtgtttcaaatgc

SEQ ID NO: 291387 - DNA, 25 bp, probe
taggaatgctgtgtgtctgtccggc

SEQ ID NO: 291388 - DNA, 25 bp, probe
taggaatgcattgtcctcaccttgt

SEQ ID NO: 291389 - DNA, 25 bp, probe
tatggaaattccttcttccagcatt

SEQ ID NO: 291390 - DNA, 25 bp, probe
tatgctaaatttgatattcccatct

SEQ ID NO: 291391 - DNA, 25 bp, probe
tatcagaaagtttgagttccctgcc

SEQ ID NO: 291392 - DNA, 25 bp, probe
tatggacatcaaattctttccttcc

SEQ ID NO: 291393 - DNA, 25 bp, probe
tatccaactctgaatcttttttcac

SEQ ID NO: 291394 - DNA, 25 bp, probe
tatccaactctgaatcttttttcac

SEQ ID NO: 291395 - DNA, 25 bp, probe
tatgtaatggtggtcattttttccc

SEQ ID NO: 291396 - DNA, 25 bp, probe
tatgtgactttggtgactcctttcc

SEQ ID NO: 291397 - DNA, 25 bp, probe
tatgtttctctggagattcctgcaa

SEQ ID NO: 291398 - DNA, 25 bp, probe
tatgcttgttctgcagcttattcaa

SEQ ID NO: 291399 - DNA, 25 bp, probe
tatgcttgttctgcagcttattcaa

SEQ ID NO: 291400 - DNA, 25 bp, probe
tatgccttcttattgcttttatgat

SEQ ID NO: 291401 - DNA, 25 bp, probe
tatgtcaacttcgagcgttttgcct

SEQ ID NO: 291402 - DNA, 25 bp, probe
tatcaaagccagcaccactttgcct

SEQ ID NO: 291403 - DNA, 25 bp, probe
tataacaacagtaccaaggtggctg

SEQ ID NO: 291404 - DNA, 25 bp, probe
tatataatatctcataatagtagac

SEQ ID NO: 291405 - DNA, 25 bp, probe
tttcaaatgctaaatatggtcgtta

SEQ ID NO: 291406 - DNA, 25 bp, probe
tatgtcaaatgtgtttgtgtcctta

SEQ ID NO: 291407 - DNA, 25 bp, probe
tatgccaaagtactgttggttcgat

SEQ ID NO: 291408 - DNA, 25 bp, probe
tatgaggacgtgtctgttatttcct

SEQ ID NO: 291409 - DNA, 25 bp, probe
tatgtgtacagttggttcatccctt

SEQ ID NO: 291410 - DNA, 25 bp, probe
tatggttcatgttatatcctcccca

SEQ ID NO: 291411 - DNA, 25 bp, probe
tatggcttttataatggctgaaata

SEQ ID NO: 291412 - DNA, 25 bp, probe
tatgcctgttatctgtggcgtttca

SEQ ID NO: 291413 - DNA, 25 bp, probe
tatggctcagccagctatgggtatc

SEQ ID NO: 291414 - DNA, 25 bp, probe
tatggtagcacattgcggggcattc

SEQ ID NO: 291415 - DNA, 25 bp, probe
tatgtgatcagaagctgcgtcccaa

SEQ ID NO: 291416 - DNA, 25 bp, probe
tatggcatcgaggcggacgacaacc

SEQ ID NO: 291417 - DNA, 25 bp, probe
tatggcatcgaggcggacgacaacc

SEQ ID NO: 291418 - DNA, 25 bp, probe
tatggaaggcgcttcaccatcaaga

SEQ ID NO: 291419 - DNA, 25 bp, probe
taggcaaggtttacacagcacagaa

SEQ ID NO: 291420 - DNA, 25 bp, probe
tatggatactgttcttacaaagcat

SEQ ID NO: 291421 - DNA, 25 bp, probe
tatggacatcttttgtgaaatactt

SEQ ID NO: 291422 - DNA, 25 bp, probe
tatgtgacttttctgattaatatat

SEQ ID NO: 291423 - DNA, 25 bp, probe
tatgtcctttgtatctctaagttac

SEQ ID NO: 291424 - DNA, 25 bp, probe
tatgtccttacatttctgaaagctt

SEQ ID NO: 291425 - DNA, 25 bp, probe
tatgtgcttacctaacttgaacatt

SEQ ID NO: 291426 - DNA, 25 bp, probe
tatgagttcctgcaacttcacacat

SEQ ID NO: 291427 - DNA, 25 bp, probe
tatgatttcccacagttcagcacat

SEQ ID NO: 291428 - DNA, 25 bp, probe
tatcaggcccctgagttactatttg

SEQ ID NO: 291429 - DNA, 25 bp, probe
tttacctcacggcttactgtctgag

SEQ ID NO: 291430 - DNA, 25 bp, probe
tttccccagggcacgtggttgagtg

SEQ ID NO: 291431 - DNA, 25 bp, probe
tttccccggagtacctattgtagat

SEQ ID NO: 291432 - DNA, 25 bp, probe
tttccagccgttgaccaattatagt

SEQ ID NO: 291433 - DNA, 25 bp, probe
tttccaaaactaccctagtacagtg

SEQ ID NO: 291434 - DNA, 25 bp, probe
tttccaaaatccgccgtggacagtt

SEQ ID NO: 291435 - DNA, 25 bp, probe
tattcaaaaaactccaggctggcag

SEQ ID NO: 291436 - DNA, 25 bp, probe
ttcttgacaaaacctaacttgcgca

SEQ ID NO: 291437 - DNA, 25 bp, probe
ttttatccaagaccttacaaccaca

SEQ ID NO: 291438 - DNA, 25 bp, probe
tatgtgttcaaatgttattaaccac

SEQ ID NO: 291439 - DNA, 25 bp, probe
tatctgttaactattatccaaacaa

SEQ ID NO: 291440 - DNA, 25 bp, probe
tatgctgtacccagtttctaaactg

SEQ ID NO: 291441 - DNA, 25 bp, probe
tatgctgtacccagtttctaaactg

SEQ ID NO: 291442 - DNA, 25 bp, probe
tatggtaccatttgaattgtaactt

SEQ ID NO: 291443 - DNA, 25 bp, probe
tatgtgtaaatttcacttttacttt

SEQ ID NO: 291444 - DNA, 25 bp, probe
taggagaaaccagcttttactgttt

SEQ ID NO: 291445 - DNA, 25 bp, probe
taggataaaccaatcatcttaactt

SEQ ID NO: 291446 - DNA, 25 bp, probe
tatggataagacccgagctttgatt

SEQ ID NO: 291447 - DNA, 25 bp, probe
tatggacaacatcccaacattatta

SEQ ID NO: 291448 - DNA, 25 bp, probe
tatgagcacaactttcaaattatgt

SEQ ID NO: 291449 - DNA, 25 bp, probe
tatgatccagccaaacgaatttctg

SEQ ID NO: 291450 - DNA, 25 bp, probe
tatgtctccagatacaaaacttgta

SEQ ID NO: 291451 - DNA, 25 bp, probe
tatgtctccagatacaaaacttgta

SEQ ID NO: 291452 - DNA, 25 bp, probe
tatggaccaaaagatcaccagtgta

SEQ ID NO: 291453 - DNA, 25 bp, probe
taggactcacgttaactcacattta

SEQ ID NO: 291454 - DNA, 25 bp, probe
taggactcacgttaactcacattta

SEQ ID NO: 291455 - DNA, 25 bp, probe
tatgtagtccgttaacactacttaa

SEQ ID NO: 291456 - DNA, 25 bp, probe
tatgcaagactctcaaggagtactt

SEQ ID NO: 291457 - DNA, 25 bp, probe
tatcaaggtcccaaaatattctttt

SEQ ID NO: 291458 - DNA, 25 bp, probe
tataatgagccgttaagtcttttct

SEQ ID NO: 291459 - DNA, 25 bp, probe
tatcaacagcaccattcctggcatt

SEQ ID NO: 291460 - DNA, 25 bp, probe
tatccggcagtaagcgctgtctggg

SEQ ID NO: 291461 - DNA, 25 bp, probe
tatgcgggatgtacgacattttgtg

SEQ ID NO: 291462 - DNA, 25 bp, probe
taggctgtgagtcctgcaatgtcct

SEQ ID NO: 291463 - DNA, 25 bp, probe
taggctgtgagtcctgcaatgtcct

SEQ ID NO: 291464 - DNA, 25 bp, probe
tatcgctgttgaatctcagagtgtc

SEQ ID NO: 291465 - DNA, 25 bp, probe
tatcgctgttgaatctcagagtgtc

SEQ ID NO: 291466 - DNA, 25 bp, probe
tatggatgtctcaaccggcagatcc

SEQ ID NO: 291467 - DNA, 25 bp, probe
tatggagacctaggggagacaccgc

SEQ ID NO: 291468 - DNA, 25 bp, probe
tatgggagtctgagtgtgcacaagc

SEQ ID NO: 291469 - DNA, 25 bp, probe
tatgagggtcagggcagtatctctc

SEQ ID NO: 291470 - DNA, 25 bp, probe
tatggggtcaggtatgtgagctcta

SEQ ID NO: 291471 - DNA, 25 bp, probe
tatgaggagatcctgccggagctgg

SEQ ID NO: 291472 - DNA, 25 bp, probe
tatgaggagatcctgccggagctgg

SEQ ID NO: 291473 - DNA, 25 bp, probe
tatgtgtggcaccatctctgtggtg

SEQ ID NO: 291474 - DNA, 25 bp, probe
tatgacatgccacatgccgtgttaa

SEQ ID NO: 291475 - DNA, 25 bp, probe
tatgaagccatgtctcactgtttaa

SEQ ID NO: 291476 - DNA, 25 bp, probe
tatgtccacatgttcctgatggcca

SEQ ID NO: 291477 - DNA, 25 bp, probe
tatgttcactgtgccataatgctgc

SEQ ID NO: 291478 - DNA, 25 bp, probe
tatgttactgtctgggagcagcttc

SEQ ID NO: 291479 - DNA, 25 bp, probe
taggaacgtcaaagaaagcgccgct

SEQ ID NO: 291480 - DNA, 25 bp, probe
tatggacggtcggatgcaaagcccc

SEQ ID NO: 291481 - DNA, 25 bp, probe
tatggacggtcggatgcaaagcccc

SEQ ID NO: 291482 - DNA, 25 bp, probe
tataaccagtctcagcaagacatcc

SEQ ID NO: 291483 - DNA, 25 bp, probe
tatgattccacccatggcaaattcc

SEQ ID NO: 291484 - DNA, 25 bp, probe
tatgttctcaacgcagtaattccca

SEQ ID NO: 291485 - DNA, 25 bp, probe
tatgttctcaacgcagtaattccca

SEQ ID NO: 291486 - DNA, 25 bp, probe
tatccctaacaggctgtagattacc

SEQ ID NO: 291487 - DNA, 25 bp, probe
tatccctgaaacctgcatagagttt

SEQ ID NO: 291488 - DNA, 25 bp, probe
tatcctgtgaactcctagctgtggt

SEQ ID NO: 291489 - DNA, 25 bp, probe
tatctctgtaatcatgcaatagctg

SEQ ID NO: 291490 - DNA, 25 bp, probe
tatgcacgctgaatcctgctatggt

SEQ ID NO: 291491 - DNA, 25 bp, probe
tatgccgcattgttcgtggcagtag

SEQ ID NO: 291492 - DNA, 25 bp, probe
tatggctgctgtttgattatgcaga

SEQ ID NO: 291493 - DNA, 25 bp, probe
tatggctgctgtttgattatgcaga

SEQ ID NO: 291494 - DNA, 25 bp, probe
tatggctgcctcttattatggcttt

SEQ ID NO: 291495 - DNA, 25 bp, probe
tatggccctatctgaatgcctctgt

SEQ ID NO: 291496 - DNA, 25 bp, probe
tatggacctagcttgaggcaatttt

SEQ ID NO: 291497 - DNA, 25 bp, probe
tatgtgacgtggttcttctggtttt

SEQ ID NO: 291498 - DNA, 25 bp, probe
tatgtacagaaatttttagtgtttt

SEQ ID NO: 291499 - DNA, 25 bp, probe
tatgataaaaagcttgtacctcctt

SEQ ID NO: 291500 - DNA, 25 bp, probe
tatgtgaacaactgtttgtcttttt

SEQ ID NO: 291501 - DNA, 25 bp, probe
tatgtgaaagatccagtgttggaat

SEQ ID NO: 291502 - DNA, 25 bp, probe
tatgtgaacatgtcgctgtttgaga

SEQ ID NO: 291503 - DNA, 25 bp, probe
tatgcgaacatacctgatatcaaga

SEQ ID NO: 291504 - DNA, 25 bp, probe
tatgcagatgcctaccaggacctgt

SEQ ID NO: 291505 - DNA, 25 bp, probe
tatgcagcagcctgctcagtcacag

SEQ ID NO: 291506 - DNA, 25 bp, probe
tatgcagcagcctgctcagtcacag

SEQ ID NO: 291507 - DNA, 25 bp, probe
tatgccaccaaggccacatcgagga

SEQ ID NO: 291508 - DNA, 25 bp, probe
tatggcaccagaagctttgcgtgga

SEQ ID NO: 291509 - DNA, 25 bp, probe
tatgcctccagaagtgttggacgag

SEQ ID NO: 291510 - DNA, 25 bp, probe
tatggctcctgaaatgcttgatgat

SEQ ID NO: 291511 - DNA, 25 bp, probe
tatggccccaaagtggatgtctggt

SEQ ID NO: 291512 - DNA, 25 bp, probe
tatgagatactcgaggtggatgtcg

SEQ ID NO: 291513 - DNA, 25 bp, probe
tatggatgatgatagctatggtgta

SEQ ID NO: 291514 - DNA, 25 bp, probe
tatggctgtaagtctcatggttcag

SEQ ID NO: 291515 - DNA, 25 bp, probe
tatcagggaaattgcaggtctgcag

SEQ ID NO: 291516 - DNA, 25 bp, probe
tatgcaggaagagtagcactcactg

SEQ ID NO: 291517 - DNA, 25 bp, probe
tatcggaacatcggcactgccaggt

SEQ ID NO: 291518 - DNA, 25 bp, probe
tatccagtgactgagagctgccatc

SEQ ID NO: 291519 - DNA, 25 bp, probe
tatccagtgactgagagctgccatc

SEQ ID NO: 291520 - DNA, 25 bp, probe
tatgcacagctgcgtgcatgcggcc

SEQ ID NO: 291521 - DNA, 25 bp, probe
tatgctcatctgagtgacggatatg

SEQ ID NO: 291522 - DNA, 25 bp, probe
tatgcttctcaaggacaggatggtg

SEQ ID NO: 291523 - DNA, 25 bp, probe
tatcttctaaacttggcagtttcta

SEQ ID NO: 291524 - DNA, 25 bp, probe
tatgcttctgaactcgggtttctta

SEQ ID NO: 291525 - DNA, 25 bp, probe
tatgcttcaggattaggttattttc

SEQ ID NO: 291526 - DNA, 25 bp, probe
tatggattctgacagagatttcttt

SEQ ID NO: 291527 - DNA, 25 bp, probe
tatggtcactagaaagtctctttat

SEQ ID NO: 291528 - DNA, 25 bp, probe
taggctactaagtgcattttcatca

SEQ ID NO: 291529 - DNA, 25 bp, probe
taggcacctcaaggacttttctgct

SEQ ID NO: 291530 - DNA, 25 bp, probe
taggcaccgagatgagcgtggacgt

SEQ ID NO: 291531 - DNA, 25 bp, probe
taggcacctgagcataggtatgacc

SEQ ID NO: 291532 - DNA, 25 bp, probe
taggcagcagcttgaagagtttggc

SEQ ID NO: 291533 - DNA, 25 bp, probe
taggcagcagcttgaagagtttggc

SEQ ID NO: 291534 - DNA, 25 bp, probe
taggcagcagcttttaatacagggt

SEQ ID NO: 291535 - DNA, 25 bp, probe
tatgccagccattaataaaaggacg

SEQ ID NO: 291536 - DNA, 25 bp, probe
tatgctagtaaacacaagaggacag

SEQ ID NO: 291537 - DNA, 25 bp, probe
tatgctccagaacttcaaagggaag

SEQ ID NO: 291538 - DNA, 25 bp, probe
tataccgacatgatcaaaaccaaaa

SEQ ID NO: 291539 - DNA, 25 bp, probe
tatctccgaagttaaaatctgtaat

SEQ ID NO: 291540 - DNA, 25 bp, probe
tatctacggatttagaatgtggtaa

SEQ ID NO: 291541 - DNA, 25 bp, probe
ttctaccgaattcgaggggaaatcg

SEQ ID NO: 291542 - DNA, 25 bp, probe
tattagggaattagggggaagatgg

SEQ ID NO: 291543 - DNA, 25 bp, probe
tattggggagtggggggcagggtcg

SEQ ID NO: 291544 - DNA, 25 bp, probe
ttccgggaccctgaggaagagacgg

SEQ ID NO: 291545 - DNA, 25 bp, probe
ttccggaactttgacgtcgatgggg

SEQ ID NO: 291546 - DNA, 25 bp, probe
ttcaaggcccttagtacgtgcggct

SEQ ID NO: 291547 - DNA, 25 bp, probe
tataaacccctcagacagtttgctt

SEQ ID NO: 291548 - DNA, 25 bp, probe
tataaaccgccctttttgtatgcac

SEQ ID NO: 291549 - DNA, 25 bp, probe
tataaacctcatctagggtatatac

SEQ ID NO: 291550 - DNA, 25 bp, probe
tataaccctacagaggtggtgagca

SEQ ID NO: 291551 - DNA, 25 bp, probe
tatacatcctctgcccagggaggtg

SEQ ID NO: 291552 - DNA, 25 bp, probe
tatacatcctctgcccagggaggtg

SEQ ID NO: 291553 - DNA, 25 bp, probe
tataattgcttccaaacagctgggt

SEQ ID NO: 291554 - DNA, 25 bp, probe
tatatattttgtctacgatgggatt

SEQ ID NO: 291555 - DNA, 25 bp, probe
tatactttgctttttctaggtatct

SEQ ID NO: 291556 - DNA, 25 bp, probe
tatgactttcctttttggtaatatt

SEQ ID NO: 291557 - DNA, 25 bp, probe
ttaaaatacattatcgttcacaatt

SEQ ID NO: 291558 - DNA, 25 bp, probe
tatggaaacacttctttcttccaat

SEQ ID NO: 291559 - DNA, 25 bp, probe
tatggcaaacacttcaagctcttaa

SEQ ID NO: 291560 - DNA, 25 bp, probe
tatccaaacatcttccaatttattt

SEQ ID NO: 291561 - DNA, 25 bp, probe
tatccaacagacactcaataaactt

SEQ ID NO: 291562 - DNA, 25 bp, probe
tattcaagcactcttaaaaccactt

SEQ ID NO: 291563 - DNA, 25 bp, probe
tattcaagcactcttaaaaccactt

SEQ ID NO: 291564 - DNA, 25 bp, probe
tatgcaaactctctcattaaccctt

SEQ ID NO: 291565 - DNA, 25 bp, probe
tatgtggactgctctagcaaaccct

SEQ ID NO: 291566 - DNA, 25 bp, probe
tatgcggttcttacagcacatcacc

SEQ ID NO: 291567 - DNA, 25 bp, probe
tatgccgttattggagcagatctcc

SEQ ID NO: 291568 - DNA, 25 bp, probe
tatgcctttgagagcaagacccatc

SEQ ID NO: 291569 - DNA, 25 bp, probe
tatgcctttgagagcaagacccatc

SEQ ID NO: 291570 - DNA, 25 bp, probe
tatccttctggtggtagtcccactt

SEQ ID NO: 291571 - DNA, 25 bp, probe
tatccttctggtggtagtcccactt

SEQ ID NO: 291572 - DNA, 25 bp, probe
tatccttctcgtttgagtactacta

SEQ ID NO: 291573 - DNA, 25 bp, probe
tatccaacattgcacgagtatcttt

SEQ ID NO: 291574 - DNA, 25 bp, probe
tatctcaacggcctcggcaattgtt

SEQ ID NO: 291575 - DNA, 25 bp, probe
tatctcaacggcctcggcaattgtt

SEQ ID NO: 291576 - DNA, 25 bp, probe
ttctaccgtccttgtcataactttg

SEQ ID NO: 291577 - DNA, 25 bp, probe
ttctaccgtccttgtcataactttg

SEQ ID NO: 291578 - DNA, 25 bp, probe
tttgaccccagcgagatcaaagttg

SEQ ID NO: 291579 - DNA, 25 bp, probe
tttgaagcctagcaacattgttgtg

SEQ ID NO: 291580 - DNA, 25 bp, probe
tatctgagcaacaggaattttcttc

SEQ ID NO: 291581 - DNA, 25 bp, probe
tttaaacggagtcttgctatatcgc

SEQ ID NO: 291582 - DNA, 25 bp, probe
ttttaaacggagtcttgctatatcg

SEQ ID NO: 291583 - DNA, 25 bp, probe
tttagggaagggtgatgtatttgga

SEQ ID NO: 291584 - DNA, 25 bp, probe
tatctggggtaggggggcttttatg

SEQ ID NO: 291585 - DNA, 25 bp, probe
tatttgggtaggtgacctgcttgga

SEQ ID NO: 291586 - DNA, 25 bp, probe
tttctggggggatgtccattttgga

SEQ ID NO: 291587 - DNA, 25 bp, probe
tttctggggctcttagcccttggtg

SEQ ID NO: 291588 - DNA, 25 bp, probe
tttcgggatgtattactccttagcc

SEQ ID NO: 291589 - DNA, 25 bp, probe
ttggctgggaggctgacccaggacc

SEQ ID NO: 291590 - DNA, 25 bp, probe
ttggctgggaggctgacccaggacc

SEQ ID NO: 291591 - DNA, 25 bp, probe
ttggtggtcaggatgggtgggagcc

SEQ ID NO: 291592 - DNA, 25 bp, probe
tatggggtcaccatgtgggaggcct

SEQ ID NO: 291593 - DNA, 25 bp, probe
tatggagtgtgcggcgatggggacc

SEQ ID NO: 291594 - DNA, 25 bp, probe
tatgaggaggcccacaaggccctct

SEQ ID NO: 291595 - DNA, 25 bp, probe
tatgaggaggcccacaaggccctct

SEQ ID NO: 291596 - DNA, 25 bp, probe
tatgtggggacacccatggccagtt

SEQ ID NO: 291597 - DNA, 25 bp, probe
tatgagggaagccctgattcacagg

SEQ ID NO: 291598 - DNA, 25 bp, probe
tatggttgctagcttcagctccaag

SEQ ID NO: 291599 - DNA, 25 bp, probe
tatgcagcattgacatccttccatg

SEQ ID NO: 291600 - DNA, 25 bp, probe
tatgatgcactgattccatcccagg

SEQ ID NO: 291601 - DNA, 25 bp, probe
tatgatcatctgggtcctagccatc

SEQ ID NO: 291602 - DNA, 25 bp, probe
tatgcatcttgctgtatccaggcct

SEQ ID NO: 291603 - DNA, 25 bp, probe
tatgttctgcaagacgctgtcctca

SEQ ID NO: 291604 - DNA, 25 bp, probe
tatgttctgcaatatcctgcagctc

SEQ ID NO: 291605 - DNA, 25 bp, probe
tatgttgacacatttcctggtgctc

SEQ ID NO: 291606 - DNA, 25 bp, probe
tatgggaccatctttgctgtgtact

SEQ ID NO: 291607 - DNA, 25 bp, probe
tatgggaccatctttgctgtgtact

SEQ ID NO: 291608 - DNA, 25 bp, probe
tatggagacagcactgccaggtcct

SEQ ID NO: 291609 - DNA, 25 bp, probe
tatggagtagctctacagcctggcc

SEQ ID NO: 291610 - DNA, 25 bp, probe
tttgggaatgggtcagcctaccgtg

SEQ ID NO: 291611 - DNA, 25 bp, probe
ttccaggttgatatcacctacacgg

SEQ ID NO: 291612 - DNA, 25 bp, probe
tatccaggctgtgctatccctgtac

SEQ ID NO: 291613 - DNA, 25 bp, probe
tatcagctgtggcatattacctgta

SEQ ID NO: 291614 - DNA, 25 bp, probe
tatcggcagtggagctactgctgtg

SEQ ID NO: 291615 - DNA, 25 bp, probe
tatgcggcagagatttccatcggat

SEQ ID NO: 291616 - DNA, 25 bp, probe
tatgcagtggtgatgcctaaaggaa

SEQ ID NO: 291617 - DNA, 25 bp, probe
tatcactggtgaaagcttactggaa

SEQ ID NO: 291618 - DNA, 25 bp, probe
tatgcaatggaaaacagccacaaaa

SEQ ID NO: 291619 - DNA, 25 bp, probe
tatgcaatggaaaacagccacaaaa

SEQ ID NO: 291620 - DNA, 25 bp, probe
tatcaaagtcagtaagccaagaaaa

SEQ ID NO: 291621 - DNA, 25 bp, probe
tatcgaagtgtgtatcaaaagagac

SEQ ID NO: 291622 - DNA, 25 bp, probe
tatcgggttgattgccgaagtgaag

SEQ ID NO: 291623 - DNA, 25 bp, probe
tatcggggtcattgccaatgatatg

SEQ ID NO: 291624 - DNA, 25 bp, probe
tatccgtggatcatacaatcaatca

SEQ ID NO: 291625 - DNA, 25 bp, probe
tatccctggtttcgcagagcactga

SEQ ID NO: 291626 - DNA, 25 bp, probe
tatggcctggagagcgtgagctatg

SEQ ID NO: 291627 - DNA, 25 bp, probe
tatgcccttgagtctagatggatat

SEQ ID NO: 291628 - DNA, 25 bp, probe
tatgccgtatgatttcagtagaaca

SEQ ID NO: 291629 - DNA, 25 bp, probe
tatcgctgggcatttttcatggcca

SEQ ID NO: 291630 - DNA, 25 bp, probe
tatcctggacatgaatgtattgtac

SEQ ID NO: 291631 - DNA, 25 bp, probe
tatcatctggagccctagtatctaa

SEQ ID NO: 291632 - DNA, 25 bp, probe
tatacagtagtgactcccatgctaa

SEQ ID NO: 291633 - DNA, 25 bp, probe
tatgacctatatgctcctgatttaa

SEQ ID NO: 291634 - DNA, 25 bp, probe
tatggccagattctccagatgaccc

SEQ ID NO: 291635 - DNA, 25 bp, probe
tatggccagtgtccctatgaaggga

SEQ ID NO: 291636 - DNA, 25 bp, probe
tatggcctgtggggctctgagggcc

SEQ ID NO: 291637 - DNA, 25 bp, probe
tatggcctgtggggctctgagggcc

SEQ ID NO: 291638 - DNA, 25 bp, probe
tatgacagctgcggtacttgagggc

SEQ ID NO: 291639 - DNA, 25 bp, probe
tatgcagactgcagggcttgaaatg

SEQ ID NO: 291640 - DNA, 25 bp, probe
tatcgacatgtcatgctgcccaagg

SEQ ID NO: 291641 - DNA, 25 bp, probe
tatgctgactgtattaccaaagaca

SEQ ID NO: 291642 - DNA, 25 bp, probe
tatgtactttgtccttcagcaagaa

SEQ ID NO: 291643 - DNA, 25 bp, probe
tatgcttccctcttcattcagaaga

SEQ ID NO: 291644 - DNA, 25 bp, probe
tatcttacactggatcaccaactac

SEQ ID NO: 291645 - DNA, 25 bp, probe
tatgtgtcatcaatgtacatgccaa

SEQ ID NO: 291646 - DNA, 25 bp, probe
tatgctgattcaaccttgccacagt

SEQ ID NO: 291647 - DNA, 25 bp, probe
tatgagagctatggccttggcagct

SEQ ID NO: 291648 - DNA, 25 bp, probe
tatagatgtatggtctgctggctgt

SEQ ID NO: 291649 - DNA, 25 bp, probe
tataatatgatgtttggatgtatgt

SEQ ID NO: 291650 - DNA, 25 bp, probe
tatacagtatgtggtggagtttgcc

SEQ ID NO: 291651 - DNA, 25 bp, probe
tatcaagcaagtatgaagttattca

SEQ ID NO: 291652 - DNA, 25 bp, probe
tatcaagcaagtatgaagttattca

SEQ ID NO: 291653 - DNA, 25 bp, probe
tatgcagagctataagatacttgtt

SEQ ID NO: 291654 - DNA, 25 bp, probe
tatgcagagctataagatacttgtt

SEQ ID NO: 291655 - DNA, 25 bp, probe
tatcagatgctgagacacatgtctc

SEQ ID NO: 291656 - DNA, 25 bp, probe
tatgcagaatgacgatgcctgcctt

SEQ ID NO: 291657 - DNA, 25 bp, probe
tatgcactttgcaatgccaccttca

SEQ ID NO: 291658 - DNA, 25 bp, probe
tatgatccattttgtatggtctcaa

SEQ ID NO: 291659 - DNA, 25 bp, probe
tatgatcctgactagaatgctgtgt

SEQ ID NO: 291660 - DNA, 25 bp, probe
tatgatcctgactagaatgctgtgt

SEQ ID NO: 291661 - DNA, 25 bp, probe
tatgtctctacatggtattgtaatg

SEQ ID NO: 291662 - DNA, 25 bp, probe
tatgttctattcatcttttgaatgt

SEQ ID NO: 291663 - DNA, 25 bp, probe
tatgattcataatttcagtttacta

SEQ ID NO: 291664 - DNA, 25 bp, probe
tatgcttcagaagtgtccttctgtt

SEQ ID NO: 291665 - DNA, 25 bp, probe
tatggctatggaggtgattttgtgg

SEQ ID NO: 291666 - DNA, 25 bp, probe
tatggctatggaggtgattttgtgg

SEQ ID NO: 291667 - DNA, 25 bp, probe
tatgagtcaggctctgtttattgtt

SEQ ID NO: 291668 - DNA, 25 bp, probe
tatgttagcatcgactctttctttt

SEQ ID NO: 291669 - DNA, 25 bp, probe
tatgcattacacaccttagctataa

SEQ ID NO: 291670 - DNA, 25 bp, probe
tatgatctacacccgtttcttaaaa

SEQ ID NO: 291671 - DNA, 25 bp, probe
tatgactatgcactaaggtcttata

SEQ ID NO: 291672 - DNA, 25 bp, probe
tatgagcaggagaaagcagtcttcc

SEQ ID NO: 291673 - DNA, 25 bp, probe
tatgagcactggaaacagtttcatg

SEQ ID NO: 291674 - DNA, 25 bp, probe
tatgaatctgggcagcagatgttcc

SEQ ID NO: 291675 - DNA, 25 bp, probe
tatgaggcaggtgagagatgtttga

SEQ ID NO: 291676 - DNA, 25 bp, probe
tatctggcaccagaggtgttagaag

SEQ ID NO: 291677 - DNA, 25 bp, probe
tatcatgtgaaacagtggttgccaa

SEQ ID NO: 291678 - DNA, 25 bp, probe
tatctggaatgactagagggagcca

SEQ ID NO: 291679 - DNA, 25 bp, probe
tattcagaccagagaggtgcgccat

SEQ ID NO: 291680 - DNA, 25 bp, probe
tatgaacaccagaaaggtcacctgc

SEQ ID NO: 291681 - DNA, 25 bp, probe
tatgaaccaatagcaaccactctcc

SEQ ID NO: 291682 - DNA, 25 bp, probe
tatgaaccaatagcaaccactctcc

SEQ ID NO: 291683 - DNA, 25 bp, probe
tatatacccacagacttcagttcct

SEQ ID NO: 291684 - DNA, 25 bp, probe
tataaccgctacactacagagtctg

SEQ ID NO: 291685 - DNA, 25 bp, probe
tatgaccccaacgctggagcagtat

SEQ ID NO: 291686 - DNA, 25 bp, probe
tatcaccaccaaactctatgacggc

SEQ ID NO: 291687 - DNA, 25 bp, probe
tatctcccctgagctgtgtgagggc

SEQ ID NO: 291688 - DNA, 25 bp, probe
tatctcccctgagctgtgtgagggc

SEQ ID NO: 291689 - DNA, 25 bp, probe
tatgcattgccctatgcactgttag

SEQ ID NO: 291690 - DNA, 25 bp, probe
tatgttccgctgtacatgttcagta

SEQ ID NO: 291691 - DNA, 25 bp, probe
tatgttccgctgtacatgttcagta

SEQ ID NO: 291692 - DNA, 25 bp, probe
tatttcccttgctagtgtgcagata

SEQ ID NO: 291693 - DNA, 25 bp, probe
tatccctcctggtcagtacatggat

SEQ ID NO: 291694 - DNA, 25 bp, probe
tatccctcctggtcagtacatggat

SEQ ID NO: 291695 - DNA, 25 bp, probe
tatccctcctggtcagtacatggat

SEQ ID NO: 291696 - DNA, 25 bp, probe
tatctcccacgactcagtgaagttt

SEQ ID NO: 291697 - DNA, 25 bp, probe
tatcctacacgactaggaacttgca

SEQ ID NO: 291698 - DNA, 25 bp, probe
tatcacaaacgactacggtctggac

SEQ ID NO: 291699 - DNA, 25 bp, probe
tatctagcaagccgctggggcttgg

SEQ ID NO: 291700 - DNA, 25 bp, probe
tatccaaagctacggatgagctgaa

SEQ ID NO: 291701 - DNA, 25 bp, probe
tataccagtccacggatagtgaaga

SEQ ID NO: 291702 - DNA, 25 bp, probe
tatacgcgttccctgtgagcgtgtg

SEQ ID NO: 291703 - DNA, 25 bp, probe
tatgggccttggcagtgcaggagag

SEQ ID NO: 291704 - DNA, 25 bp, probe
tatgtatcctttcggcatgtggagg

SEQ ID NO: 291705 - DNA, 25 bp, probe
tatgtcatctcttctctagcaggaa

SEQ ID NO: 291706 - DNA, 25 bp, probe
tatgtgcttttcaataggaatcatt

SEQ ID NO: 291707 - DNA, 25 bp, probe
tatgcacttcccaattgggatttta

SEQ ID NO: 291708 - DNA, 25 bp, probe
tatgcatttttctatccttggttta

SEQ ID NO: 291709 - DNA, 25 bp, probe
tatgagttttctaatcatagagatg

SEQ ID NO: 291710 - DNA, 25 bp, probe
tatgcagtgtgctttttcttgccag

SEQ ID NO: 291711 - DNA, 25 bp, probe
tatatgggcttgctacttcctgtaa

SEQ ID NO: 291712 - DNA, 25 bp, probe
tatctgatggtcccatactacccta

SEQ ID NO: 291713 - DNA, 25 bp, probe
tatgcagaggaagcttctacgcgct

SEQ ID NO: 291714 - DNA, 25 bp, probe
tatgcggagtgagcctgctcagcca

SEQ ID NO: 291715 - DNA, 25 bp, probe
tatggagggagcagcctcacacaag

SEQ ID NO: 291716 - DNA, 25 bp, probe
tatgagagtgggggccacctctacc

SEQ ID NO: 291717 - DNA, 25 bp, probe
tatgtgagtggggtgctacccttcg

SEQ ID NO: 291718 - DNA, 25 bp, probe
tatgctgggggtgcttccccatagg

SEQ ID NO: 291719 - DNA, 25 bp, probe
tatggtgggtatgtcccgcagcaga

SEQ ID NO: 291720 - DNA, 25 bp, probe
tatggagtggtgactccctcactca

SEQ ID NO: 291721 - DNA, 25 bp, probe
tatgtatgggagagcagactgcacc

SEQ ID NO: 291722 - DNA, 25 bp, probe
tatgtagctacgagatggtaccgag

SEQ ID NO: 291723 - DNA, 25 bp, probe
tatgtatctactgcttgatgtaact

SEQ ID NO: 291724 - DNA, 25 bp, probe
tatggtgtctcgtctttgtgaatct

SEQ ID NO: 291725 - DNA, 25 bp, probe
tatggtcttctgttttgaagctcat

SEQ ID NO: 291726 - DNA, 25 bp, probe
tatgatgttactttatgtgaattct

SEQ ID NO: 291727 - DNA, 25 bp, probe
tatgtgttggtttattgattctgta

SEQ ID NO: 291728 - DNA, 25 bp, probe
tatgtttttatggttcatgttatat

SEQ ID NO: 291729 - DNA, 25 bp, probe
tatgtcatattttgccactgccttt

SEQ ID NO: 291730 - DNA, 25 bp, probe
tatccatcttttccatgatgcttcc

SEQ ID NO: 291731 - DNA, 25 bp, probe
tatcaagtgtttctgcatggtaatg

SEQ ID NO: 291732 - DNA, 25 bp, probe
tatctcgtggatagttcatggtaat

SEQ ID NO: 291733 - DNA, 25 bp, probe
tatttgaggtgtgctcatactaaaa

SEQ ID NO: 291734 - DNA, 25 bp, probe
tatcaaaattgggctcactataata

SEQ ID NO: 291735 - DNA, 25 bp, probe
tatgtaaatgtgttagcactgatag

SEQ ID NO: 291736 - DNA, 25 bp, probe
tatgtcaggattaccagattacatg

SEQ ID NO: 291737 - DNA, 25 bp, probe
tatgtaggtgctccactaatatcca

SEQ ID NO: 291738 - DNA, 25 bp, probe
tatgctaatgtcccctcagagatga

SEQ ID NO: 291739 - DNA, 25 bp, probe
tatgcagttattccactaaatgatg

SEQ ID NO: 291740 - DNA, 25 bp, probe
tatgctgttattccttacctagaga

SEQ ID NO: 291741 - DNA, 25 bp, probe
tatgtggctccatctgtacttgaaa

SEQ ID NO: 291742 - DNA, 25 bp, probe
tatgggaccaaagactagacagaat

SEQ ID NO: 291743 - DNA, 25 bp, probe
tatggggtggaagctctcaaataca

SEQ ID NO: 291744 - DNA, 25 bp, probe
tatggtgtgtggaattcttactgtg

SEQ ID NO: 291745 - DNA, 25 bp, probe
tatggtgtgtggaattcttactgtg

SEQ ID NO: 291746 - DNA, 25 bp, probe
tatagatggctggaattctcaaggg

SEQ ID NO: 291747 - DNA, 25 bp, probe
tatctgtgacttcatgctctgataa

SEQ ID NO: 291748 - DNA, 25 bp, probe
tatcagaaatggttggcctgagcaa

SEQ ID NO: 291749 - DNA, 25 bp, probe
tatcaacaaggagggccatgtgaag

SEQ ID NO: 291750 - DNA, 25 bp, probe
tatctacaccgtgggccatagcatc

SEQ ID NO: 291751 - DNA, 25 bp, probe
tatccagcaacatttgggccagcta

SEQ ID NO: 291752 - DNA, 25 bp, probe
tatgccagaaattaggctaccaatt

SEQ ID NO: 291753 - DNA, 25 bp, probe
tatcgagccaaatggatatcacagg

SEQ ID NO: 291754 - DNA, 25 bp, probe
tatggtccacacggaggtcagctga

SEQ ID NO: 291755 - DNA, 25 bp, probe
tatgaccgtcagcgtggtcatctga

SEQ ID NO: 291756 - DNA, 25 bp, probe
tatccctatactagtaatcattgaa

SEQ ID NO: 291757 - DNA, 25 bp, probe
tatgcaatcttacttctatatcatt

SEQ ID NO: 291758 - DNA, 25 bp, probe
tatccatcctgcctgtaattttgcg

SEQ ID NO: 291759 - DNA, 25 bp, probe
tatcctcctgagaaagacagtgctc

SEQ ID NO: 291760 - DNA, 25 bp, probe
tatgcttcttagagacacagtatca

SEQ ID NO: 291761 - DNA, 25 bp, probe
tatgcttcttagagacacagtatca

SEQ ID NO: 291762 - DNA, 25 bp, probe
tatgttcacattaagatacgttcta

SEQ ID NO: 291763 - DNA, 25 bp, probe
tatgttactttgctatgtgctccta

SEQ ID NO: 291764 - DNA, 25 bp, probe
tatcttaggtttcattgcttcagac

SEQ ID NO: 291765 - DNA, 25 bp, probe
tatcatctagtgatcttttgcatca

SEQ ID NO: 291766 - DNA, 25 bp, probe
tatgcagccagtatcttcatttatg

SEQ ID NO: 291767 - DNA, 25 bp, probe
tatcatcacagtatgagtcatttct

SEQ ID NO: 291768 - DNA, 25 bp, probe
tatgtacttgccttgttttcttcag

SEQ ID NO: 291769 - DNA, 25 bp, probe
tatgtaattggtttcctgcatcctc

SEQ ID NO: 291770 - DNA, 25 bp, probe
tatgccactcgagatgacctcatct

SEQ ID NO: 291771 - DNA, 25 bp, probe
tatgtcaccagcgcacacgctgatt

SEQ ID NO: 291772 - DNA, 25 bp, probe
tatgtacctcatactcatcatgtgt

SEQ ID NO: 291773 - DNA, 25 bp, probe
tatgtatgctccatgtctagcccat

SEQ ID NO: 291774 - DNA, 25 bp, probe
tatgttccgagtgcaatgcccactg

SEQ ID NO: 291775 - DNA, 25 bp, probe
tatgttggaaatgtgcaaccactgc

SEQ ID NO: 291776 - DNA, 25 bp, probe
tatgtgcgcgtcaacaggtaacact

SEQ ID NO: 291777 - DNA, 25 bp, probe
tatgcctgcctgaaagggaccatcc

SEQ ID NO: 291778 - DNA, 25 bp, probe
tatccacattgaaacatggagctct

SEQ ID NO: 291779 - DNA, 25 bp, probe
tatgcacatcatttaagtaggctaa

SEQ ID NO: 291780 - DNA, 25 bp, probe
ttctgctaattcgagtcatggctaa

SEQ ID NO: 291781 - DNA, 25 bp, probe
tatctcatagatacagacaaggcaa

SEQ ID NO: 291782 - DNA, 25 bp, probe
tatccaggtagctatcaaggccatc

SEQ ID NO: 291783 - DNA, 25 bp, probe
tatccaggtagctatcaaggccatc

SEQ ID NO: 291784 - DNA, 25 bp, probe
tatccagtgtagcatcaaaccccat

SEQ ID NO: 291785 - DNA, 25 bp, probe
tttgatgtggactcaaagcccctga

SEQ ID NO: 291786 - DNA, 25 bp, probe
tttgggaataaaaagccattctgcg

SEQ ID NO: 291787 - DNA, 25 bp, probe
ttgggggagaaacaaaatctgcaga

SEQ ID NO: 291788 - DNA, 25 bp, probe
ttggggaggaaaacttattctgaat

SEQ ID NO: 291789 - DNA, 25 bp, probe
ttggtgtaagaacttcagtttctgt

SEQ ID NO: 291790 - DNA, 25 bp, probe
tatgtggaaaaccctcactttctct

SEQ ID NO: 291791 - DNA, 25 bp, probe
tattggggacaccaactgtcttcct

SEQ ID NO: 291792 - DNA, 25 bp, probe
tatacagggactgatttgcttccct

SEQ ID NO: 291793 - DNA, 25 bp, probe
tatagccgagaagctgtgtttccgc

SEQ ID NO: 291794 - DNA, 25 bp, probe
tatgacccaaacctggcatttctgc

SEQ ID NO: 291795 - DNA, 25 bp, probe
tatgagcccaagaatgtgcctttca

SEQ ID NO: 291796 - DNA, 25 bp, probe
tatgtggtcattgatctccctatca

SEQ ID NO: 291797 - DNA, 25 bp, probe
tatcgttcagaagctccgcttcaca

SEQ ID NO: 291798 - DNA, 25 bp, probe
tatcggggacatccatagccttcaa

SEQ ID NO: 291799 - DNA, 25 bp, probe
tataaaggactcaaacgcgtggaaa

SEQ ID NO: 291800 - DNA, 25 bp, probe
tattacatcgttcatccggtggaaa

SEQ ID NO: 291801 - DNA, 25 bp, probe
tattaatgcgttggcccacgtagca

SEQ ID NO: 291802 - DNA, 25 bp, probe
tattaatgcgttcccagtcatttca

SEQ ID NO: 291803 - DNA, 25 bp, probe
tattaatgcgttcccagtcatttca

SEQ ID NO: 291804 - DNA, 25 bp, probe
tatacggctgttgcagcaggctttc

SEQ ID NO: 291805 - DNA, 25 bp, probe
tatgaccggtatgcggccatatgtc

SEQ ID NO: 291806 - DNA, 25 bp, probe
tatgaccggtatgtggccatctgtc

SEQ ID NO: 291807 - DNA, 25 bp, probe
tataccaggtagatggctactataa

SEQ ID NO: 291808 - DNA, 25 bp, probe
tatgacaacgaatttggctacagca

SEQ ID NO: 291809 - DNA, 25 bp, probe
tatgaaagtagatcctgctcacaga

SEQ ID NO: 291810 - DNA, 25 bp, probe
tatgaaataatgtactcttgctgga

SEQ ID NO: 291811 - DNA, 25 bp, probe
tataaaagcatgccaaatcttggag

SEQ ID NO: 291812 - DNA, 25 bp, probe
tatgacaacagcctcaagatcatca

SEQ ID NO: 291813 - DNA, 25 bp, probe
tatgtcaccatcatgaacactcaat

SEQ ID NO: 291814 - DNA, 25 bp, probe
tatgccctgcagagcaataacacta

SEQ ID NO: 291815 - DNA, 25 bp, probe
tatcccatgctgttcaaactgacca

SEQ ID NO: 291816 - DNA, 25 bp, probe
tatgacttgtatgacaactcccagg

SEQ ID NO: 291817 - DNA, 25 bp, probe
tatattcttccatcaactcatggca

SEQ ID NO: 291818 - DNA, 25 bp, probe
tatatgccttccgcagccaagagat

SEQ ID NO: 291819 - DNA, 25 bp, probe
tatgaacttcaccaccactagtgtc

SEQ ID NO: 291820 - DNA, 25 bp, probe
tatgtgactacacaccagcatcagg

SEQ ID NO: 291821 - DNA, 25 bp, probe
tatctgatcccatgagccagtctgt

SEQ ID NO: 291822 - DNA, 25 bp, probe
tatctctgtccatgatgcactgtta

SEQ ID NO: 291823 - DNA, 25 bp, probe
tatctctgtccatgatgcactgtta

SEQ ID NO: 291824 - DNA, 25 bp, probe
tatatctgtgtaagacacgtgcaac

SEQ ID NO: 291825 - DNA, 25 bp, probe
tatatctgtgtaagacacgtgcaac

SEQ ID NO: 291826 - DNA, 25 bp, probe
tattcagtataagccggcagcaagc

SEQ ID NO: 291827 - DNA, 25 bp, probe
tattcataaagagaccggccagatt

SEQ ID NO: 291828 - DNA, 25 bp, probe
tttcatcacgaaaacctggtcaatc

SEQ ID NO: 291829 - DNA, 25 bp, probe
tttcccaagtgatccttgactccgt

SEQ ID NO: 291830 - DNA, 25 bp, probe
ttctcccaagtgtaaaataccctca

SEQ ID NO: 291831 - DNA, 25 bp, probe
tattcccataattaaaatacaaact

SEQ ID NO: 291832 - DNA, 25 bp, probe
tattcccataattaaaatacaaact

SEQ ID NO: 291833 - DNA, 25 bp, probe
tatactccttaagttatcccaaagc

SEQ ID NO: 291834 - DNA, 25 bp, probe
tataatcctaagaacttctccaacg

SEQ ID NO: 291835 - DNA, 25 bp, probe
tatacccagactacactagtccata

SEQ ID NO: 291836 - DNA, 25 bp, probe
tatacaccatggaacactatgtgta

SEQ ID NO: 291837 - DNA, 25 bp, probe
tatcactccattacaccatcaagtc

SEQ ID NO: 291838 - DNA, 25 bp, probe
tatcactccattacaccatcaagtc

SEQ ID NO: 291839 - DNA, 25 bp, probe
tatgactggtgtcacacagctagtc

SEQ ID NO: 291840 - DNA, 25 bp, probe
tatgagatggggaacaagcttgtgc

SEQ ID NO: 291841 - DNA, 25 bp, probe
tatgactgaagtaataactgatgag

SEQ ID NO: 291842 - DNA, 25 bp, probe
tatgagctgcaagcaagagactggc

SEQ ID NO: 291843 - DNA, 25 bp, probe
tatgagctgctgacgcactgtgact

SEQ ID NO: 291844 - DNA, 25 bp, probe
tatgagctatgtgcatcgtgatctg

SEQ ID NO: 291845 - DNA, 25 bp, probe
tatctctgatgtgccgctggctgaa

SEQ ID NO: 291846 - DNA, 25 bp, probe
tatcagctgatcgcccgtgtagaag

SEQ ID NO: 291847 - DNA, 25 bp, probe
tatcagctgatcgcccgtgtagaag

SEQ ID NO: 291848 - DNA, 25 bp, probe
tatcagtgtggagccttacatactg

SEQ ID NO: 291849 - DNA, 25 bp, probe
tatagtatctatagccatgtacata

SEQ ID NO: 291850 - DNA, 25 bp, probe
tatagtatctatagccatgtacata

SEQ ID NO: 291851 - DNA, 25 bp, probe
tatgatctactcatttgctgacaca

SEQ ID NO: 291852 - DNA, 25 bp, probe
tatgtcgccattgttgtacaaccaa

SEQ ID NO: 291853 - DNA, 25 bp, probe
tatgtcgccattgttgtacaaccaa

SEQ ID NO: 291854 - DNA, 25 bp, probe
tattccatttaatggatgcaactca

SEQ ID NO: 291855 - DNA, 25 bp, probe
tatatgcgatgtaaaaccactagta

SEQ ID NO: 291856 - DNA, 25 bp, probe
ttatgaagtatataccctttaccca

SEQ ID NO: 291857 - DNA, 25 bp, probe
ttcagtgagaactgtccctttaccc

SEQ ID NO: 291858 - DNA, 25 bp, probe
tatagtagaagctgatcccctgcct

SEQ ID NO: 291859 - DNA, 25 bp, probe
tataatgtgaactttcccctgttcc

SEQ ID NO: 291860 - DNA, 25 bp, probe
tatgaatgaaacctcttcccgaaag

SEQ ID NO: 291861 - DNA, 25 bp, probe
tatgaagacatgagcttttctcgca

SEQ ID NO: 291862 - DNA, 25 bp, probe
tatgagacacagtttcttctctgga

SEQ ID NO: 291863 - DNA, 25 bp, probe
tatgcagcccattaacttctcagga

SEQ ID NO: 291864 - DNA, 25 bp, probe
tatgcaaggtttacttctcagatga

SEQ ID NO: 291865 - DNA, 25 bp, probe
tatgcaaggtttacttctcagatga

SEQ ID NO: 291866 - DNA, 25 bp, probe
tatagagggcttatgattcagattg

SEQ ID NO: 291867 - DNA, 25 bp, probe
ttggggatgcttacatggtggtatc

SEQ ID NO: 291868 - DNA, 25 bp, probe
tttggaggcctgacttggggacaac

SEQ ID NO: 291869 - DNA, 25 bp, probe
tatctgtggcgtttcatctggggaa

SEQ ID NO: 291870 - DNA, 25 bp, probe
tatgatggagcacacctctgtgggg

SEQ ID NO: 291871 - DNA, 25 bp, probe
tatgctgtgtgaaccgtcgtgtgag

SEQ ID NO: 291872 - DNA, 25 bp, probe
tatctgtgtatatgcccgtatgtgc

SEQ ID NO: 291873 - DNA, 25 bp, probe
tatgcaatctgtcaccctttgatgt

SEQ ID NO: 291874 - DNA, 25 bp, probe
tatgccactgtcagtccttttgtgc

SEQ ID NO: 291875 - DNA, 25 bp, probe
tatgccactgtcagtccttttgtgc

SEQ ID NO: 291876 - DNA, 25 bp, probe
tatcaagtgcaaacatccttttgga

SEQ ID NO: 291877 - DNA, 25 bp, probe
tattagtgcagctagtcgggtgtaa

SEQ ID NO: 291878 - DNA, 25 bp, probe
tttctggccgagtggttgctataaa

SEQ ID NO: 291879 - DNA, 25 bp, probe
tatttggctggttgggtttatagca

SEQ ID NO: 291880 - DNA, 25 bp, probe
tatttgtttgtacggaccataaata

SEQ ID NO: 291881 - DNA, 25 bp, probe
tatgttgtctttatcgactttgtaa

SEQ ID NO: 291882 - DNA, 25 bp, probe
tatgtcttctgttttcaggttctgt

SEQ ID NO: 291883 - DNA, 25 bp, probe
tatattgtattgtgtctggttcctg

SEQ ID NO: 291884 - DNA, 25 bp, probe
tataagtcattttgtttgtgtccac

SEQ ID NO: 291885 - DNA, 25 bp, probe
tatcaagtttgggtctgtgctgctg

SEQ ID NO: 291886 - DNA, 25 bp, probe
tatacagctttggaatcgtcctctg

SEQ ID NO: 291887 - DNA, 25 bp, probe
tatgatagtttgtcctgtgtcctta

SEQ ID NO: 291888 - DNA, 25 bp, probe
tatgaagttctattctgcccactta

SEQ ID NO: 291889 - DNA, 25 bp, probe
tatacagtctaattgttcatcctaa

SEQ ID NO: 291890 - DNA, 25 bp, probe
tatacactgtaatgaaccgctgaat

SEQ ID NO: 291891 - DNA, 25 bp, probe
tatacactgtaatgaaccgctgaat

SEQ ID NO: 291892 - DNA, 25 bp, probe
tatccggtggctttagccgtgcaaa

SEQ ID NO: 291893 - DNA, 25 bp, probe
tatcgggggcctacaagagtcccac

SEQ ID NO: 291894 - DNA, 25 bp, probe
tatcgggggcctacaagagtcccac

SEQ ID NO: 291895 - DNA, 25 bp, probe
tatccatgggggaccaagaatcacc

SEQ ID NO: 291896 - DNA, 25 bp, probe
tatcctctgagaatgaccaataacc

SEQ ID NO: 291897 - DNA, 25 bp, probe
tatcctttgacaactcaggaatcca

SEQ ID NO: 291898 - DNA, 25 bp, probe
tatccttcatgtcactcatgtgttc

SEQ ID NO: 291899 - DNA, 25 bp, probe
tatcctttgacctgttttcatctgg

SEQ ID NO: 291900 - DNA, 25 bp, probe
tatcctattttcttgtttatacgtt

SEQ ID NO: 291901 - DNA, 25 bp, probe
tatccattttactgttcttgggcat

SEQ ID NO: 291902 - DNA, 25 bp, probe
ttctttttccgcgtgtcggaggagc

SEQ ID NO: 291903 - DNA, 25 bp, probe
tattagaccccggggcagtcaggtg

SEQ ID NO: 291904 - DNA, 25 bp, probe
tttggaccccaggcactaggggcca

SEQ ID NO: 291905 - DNA, 25 bp, probe
tttgtggccccaacagggtgaacca

SEQ ID NO: 291906 - DNA, 25 bp, probe
tatatttgccacctacaaaaaaaca

SEQ ID NO: 291907 - DNA, 25 bp, probe
tatattcccaacaacattaaaaaat

SEQ ID NO: 291908 - DNA, 25 bp, probe
tatactaccagaaggctttaaaaag

SEQ ID NO: 291909 - DNA, 25 bp, probe
ttattattcaactggtctaaaaact

SEQ ID NO: 291910 - DNA, 25 bp, probe
tattttaaagcttggtgctaaacca

SEQ ID NO: 291911 - DNA, 25 bp, probe
tatttttacagctactttaacctat

SEQ ID NO: 291912 - DNA, 25 bp, probe
ttactgggacacttttaaactctga

SEQ ID NO: 291913 - DNA, 25 bp, probe
tatatcatggccacatccttaacct

SEQ ID NO: 291914 - DNA, 25 bp, probe
tatcactaatcaaatcacttaactt

SEQ ID NO: 291915 - DNA, 25 bp, probe
tatattgtacaatacttcagactgt

SEQ ID NO: 291916 - DNA, 25 bp, probe
tatttgtgtcaatacccgaaatgat

SEQ ID NO: 291917 - DNA, 25 bp, probe
tatatttgctcaattttccggaaat

SEQ ID NO: 291918 - DNA, 25 bp, probe
tatattgtctcaacatggtccatgt

SEQ ID NO: 291919 - DNA, 25 bp, probe
tatgcaagactgccatgggtcctgc

SEQ ID NO: 291920 - DNA, 25 bp, probe
tatgaagacaggcaagagcctgctg

SEQ ID NO: 291921 - DNA, 25 bp, probe
tatgttacaggcaactgagccactg

SEQ ID NO: 291922 - DNA, 25 bp, probe
tatgatgttaacaactcagccatct

SEQ ID NO: 291923 - DNA, 25 bp, probe
tatgattgacaagtaccaggctttg

SEQ ID NO: 291924 - DNA, 25 bp, probe
tatgatatcaaagactcattgctta

SEQ ID NO: 291925 - DNA, 25 bp, probe
tatgttcttgatgaccagtatgtca

SEQ ID NO: 291926 - DNA, 25 bp, probe
tatcactccgatgacacagacacca

SEQ ID NO: 291927 - DNA, 25 bp, probe
tatctgcttccggccaagaacagca

SEQ ID NO: 291928 - DNA, 25 bp, probe
tatctgctggaagcctcaagaagcc

SEQ ID NO: 291929 - DNA, 25 bp, probe
tatgcctatgaagtccccaggagct

SEQ ID NO: 291930 - DNA, 25 bp, probe
tatcctgatggaggctccacactag

SEQ ID NO: 291931 - DNA, 25 bp, probe
tatcctatggcaagtctgacctctc

SEQ ID NO: 291932 - DNA, 25 bp, probe
tatcctaatgaaatggccgtccaaa

SEQ ID NO: 291933 - DNA, 25 bp, probe
tatcctaatgaaatggccgtccaaa

SEQ ID NO: 291934 - DNA, 25 bp, probe
tatgactaatgatatgcctagtaaa

SEQ ID NO: 291935 - DNA, 25 bp, probe
tatagttaaaagcctaatatgcaga

SEQ ID NO: 291936 - DNA, 25 bp, probe
tatgatcttacaaacctgcaaatgg

SEQ ID NO: 291937 - DNA, 25 bp, probe
tatgttatataatatctcataatag

SEQ ID NO: 291938 - DNA, 25 bp, probe
tatgttaacagatgatccatttgaa

SEQ ID NO: 291939 - DNA, 25 bp, probe
tatttgaatcactgcattttgggaa

SEQ ID NO: 291940 - DNA, 25 bp, probe
tatttgaatcactgcattttgggaa

SEQ ID NO: 291941 - DNA, 25 bp, probe
tatattaatgccagtttagttgaca

SEQ ID NO: 291942 - DNA, 25 bp, probe
tatattaatgccagtttagttgaca

SEQ ID NO: 291943 - DNA, 25 bp, probe
tatcattaatgtaggtttagatata

SEQ ID NO: 291944 - DNA, 25 bp, probe
tatcatcctggtattttaaaagctg

SEQ ID NO: 291945 - DNA, 25 bp, probe
ttgcattctaatgttattaaaactc

SEQ ID NO: 291946 - DNA, 25 bp, probe
tatgcttttctggtttataactact

SEQ ID NO: 291947 - DNA, 25 bp, probe
tatgttttcatgggtcaggacttca

SEQ ID NO: 291948 - DNA, 25 bp, probe
tatgaaactcaggtacaaactcgac

SEQ ID NO: 291949 - DNA, 25 bp, probe
tatcaagactctgtggcaaaatgga

SEQ ID NO: 291950 - DNA, 25 bp, probe
tatgctaccacatttggcaaatatg

SEQ ID NO: 291951 - DNA, 25 bp, probe
ttatatggaatgtctgtaaattcta

SEQ ID NO: 291952 - DNA, 25 bp, probe
tatatggaatgtctgtaaattctaa

SEQ ID NO: 291953 - DNA, 25 bp, probe
tataggaagcatatgcctacttgta

SEQ ID NO: 291954 - DNA, 25 bp, probe
tatctggaggtctcatttcttgtaa

SEQ ID NO: 291955 - DNA, 25 bp, probe
tatctgaagtggttatttactcaaa

SEQ ID NO: 291956 - DNA, 25 bp, probe
tattagcgtggcttttacacttaaa

SEQ ID NO: 291957 - DNA, 25 bp, probe
tatatgatgtggctttaatacgtga

SEQ ID NO: 291958 - DNA, 25 bp, probe
tatctgcatggtattggaataactc

SEQ ID NO: 291959 - DNA, 25 bp, probe
tatctctgcgtttcagtgacctacc

SEQ ID NO: 291960 - DNA, 25 bp, probe
tttccagttaaggaccgtggccctg

SEQ ID NO: 291961 - DNA, 25 bp, probe
tttccagttagtgacttttgcccca

SEQ ID NO: 291962 - DNA, 25 bp, probe
ttaccagagtggtggattttgccaa

SEQ ID NO: 291963 - DNA, 25 bp, probe
ttcaggacgtgggtgccttttccac

SEQ ID NO: 291964 - DNA, 25 bp, probe
ttcaggaagctgagcttaccctccc

SEQ ID NO: 291965 - DNA, 25 bp, probe
ttcaggaagctgagcttaccctccc

SEQ ID NO: 291966 - DNA, 25 bp, probe
ttagggcaggattcttatccccatt

SEQ ID NO: 291967 - DNA, 25 bp, probe
ttcggtgggtattttctgcctaagt

SEQ ID NO: 291968 - DNA, 25 bp, probe
tttgagggctttcttctccataaga

SEQ ID NO: 291969 - DNA, 25 bp, probe
tttgagtggcctttcaaccctaaga

SEQ ID NO: 291970 - DNA, 25 bp, probe
tttaggctactggaaacctctccga

SEQ ID NO: 291971 - DNA, 25 bp, probe
tttaggctactggaaacctctccga

SEQ ID NO: 291972 - DNA, 25 bp, probe
ttggggtaatcatcgacaccttcgc

SEQ ID NO: 291973 - DNA, 25 bp, probe
tatgcgggtagactacgaccaggtg

SEQ ID NO: 291974 - DNA, 25 bp, probe
tatgctgggctccggagcaaccagt

SEQ ID NO: 291975 - DNA, 25 bp, probe
tatcagagcccatgaagcccaagat

SEQ ID NO: 291976 - DNA, 25 bp, probe
tatgaagccatctacctagcaaaat

SEQ ID NO: 291977 - DNA, 25 bp, probe
tataagctcctacctagaagacata

SEQ ID NO: 291978 - DNA, 25 bp, probe
tatacccatctaccaaaagcagata

SEQ ID NO: 291979 - DNA, 25 bp, probe
tatacacaattcccaaactcatttt

SEQ ID NO: 291980 - DNA, 25 bp, probe
tatacagcttttgcaaactccttct

SEQ ID NO: 291981 - DNA, 25 bp, probe
tatgaagtcttttaacagtctctct

SEQ ID NO: 291982 - DNA, 25 bp, probe
tatgaagtcttttaacagtctctct

SEQ ID NO: 291983 - DNA, 25 bp, probe
tttagtcgttttatgtttctttgca

SEQ ID NO: 291984 - DNA, 25 bp, probe
tattactggtttctacttttctata

SEQ ID NO: 291985 - DNA, 25 bp, probe
tatctattagagttttacattgttg

SEQ ID NO: 291986 - DNA, 25 bp, probe
tatgctattaagtcattctgaatct

SEQ ID NO: 291987 - DNA, 25 bp, probe
tatgctgctctcaagtgcattcatg

SEQ ID NO: 291988 - DNA, 25 bp, probe
tatgcatgtatctactgcatccttc

SEQ ID NO: 291989 - DNA, 25 bp, probe
tatgctgctatggacgacctccagc

SEQ ID NO: 291990 - DNA, 25 bp, probe
tatgctgcgctgaacagagacttcc

SEQ ID NO: 291991 - DNA, 25 bp, probe
tttggctactgcaaagctgtccgtt

SEQ ID NO: 291992 - DNA, 25 bp, probe
tatagagctccagggactgtctttt

SEQ ID NO: 291993 - DNA, 25 bp, probe
tatcagccaccaggctttggcttct

SEQ ID NO: 291994 - DNA, 25 bp, probe
tatcagccaccaggctttggcttct

SEQ ID NO: 291995 - DNA, 25 bp, probe
tatcagctttcagggttttctctcc

SEQ ID NO: 291996 - DNA, 25 bp, probe
tatacatcttcaggatgattcatct

SEQ ID NO: 291997 - DNA, 25 bp, probe
tatgagtcctatgagaagctctacg

SEQ ID NO: 291998 - DNA, 25 bp, probe
tatagtcctatttgtagcattcaat

SEQ ID NO: 291999 - DNA, 25 bp, probe
tatacttctttcctacctgatagca

SEQ ID NO: 292000 - DNA, 25 bp, probe
tatacggcttttttgctggtcagca

SEQ ID NO: 292001 - DNA, 25 bp, probe
tatagggcttcctttggtatcaaag

SEQ ID NO: 292002 - DNA, 25 bp, probe
tataaggcttaattgtggaaagcta

SEQ ID NO: 292003 - DNA, 25 bp, probe
tataatgtgctttatttgcaaatca

SEQ ID NO: 292004 - DNA, 25 bp, probe
tatacacagctttatgatatcaaag

SEQ ID NO: 292005 - DNA, 25 bp, probe
tataaatgatcttggtctattgggg

SEQ ID NO: 292006 - DNA, 25 bp, probe
tatcactgacctgggatctttgggt

SEQ ID NO: 292007 - DNA, 25 bp, probe
tatcattcaccgcgatcttaaatgt

SEQ ID NO: 292008 - DNA, 25 bp, probe
tatcttcaaggctggcttaagtata

SEQ ID NO: 292009 - DNA, 25 bp, probe
tatcccgagtgctgcgtggaagtaa

SEQ ID NO: 292010 - DNA, 25 bp, probe
tatcctcagaccaggtggaattact

SEQ ID NO: 292011 - DNA, 25 bp, probe
tatacacaaccaaggtgtgatctga

SEQ ID NO: 292012 - DNA, 25 bp, probe
tatcaccaacacagtgcttgattcc

SEQ ID NO: 292013 - DNA, 25 bp, probe
tatgagtcaagatcctgcctaacct

SEQ ID NO: 292014 - DNA, 25 bp, probe
tatcctcaagatcccatcagctaaa

SEQ ID NO: 292015 - DNA, 25 bp, probe
tatcctcaagatcccatcagctaaa

SEQ ID NO: 292016 - DNA, 25 bp, probe
tatactgaagatgccgcacacaaac

SEQ ID NO: 292017 - DNA, 25 bp, probe
tatctgggtgtctcgcaccataagc

SEQ ID NO: 292018 - DNA, 25 bp, probe
tatttgtgactctttcctaaagcca

SEQ ID NO: 292019 - DNA, 25 bp, probe
tatatttagtgcttgacactgtaga

SEQ ID NO: 292020 - DNA, 25 bp, probe
tatctttgccagttggagtgctgga

SEQ ID NO: 292021 - DNA, 25 bp, probe
tatttgctgccgtggtttcaggatc

SEQ ID NO: 292022 - DNA, 25 bp, probe
tatttcagctcccaagtttagttca

SEQ ID NO: 292023 - DNA, 25 bp, probe
tatcaacagttcctagctcttgact

SEQ ID NO: 292024 - DNA, 25 bp, probe
tatgaacgtgcatattgccttgcaa

SEQ ID NO: 292025 - DNA, 25 bp, probe
tatgcaagtgtatattcttctactg

SEQ ID NO: 292026 - DNA, 25 bp, probe
tatgaacatactttcctatttctgt

SEQ ID NO: 292027 - DNA, 25 bp, probe
ttatggcatagttcccgacgtctat

SEQ ID NO: 292028 - DNA, 25 bp, probe
tatatggaagttgtagccctctgca

SEQ ID NO: 292029 - DNA, 25 bp, probe
tatatggaagttgtagccctctgca

SEQ ID NO: 292030 - DNA, 25 bp, probe
tatgctgtaagaaatgttccctctc

SEQ ID NO: 292031 - DNA, 25 bp, probe
tatctgtacagtcatggaccctttt

SEQ ID NO: 292032 - DNA, 25 bp, probe
tatgcttatattgttcacttctttt

SEQ ID NO: 292033 - DNA, 25 bp, probe
tatgcagttttccttaaattatcta

SEQ ID NO: 292034 - DNA, 25 bp, probe
tatgcagtttatgtgtcatcaatgt

SEQ ID NO: 292035 - DNA, 25 bp, probe
tatgctgtacatttcagttcagtgt

SEQ ID NO: 292036 - DNA, 25 bp, probe
tatgctttcatttttatcactgtca

SEQ ID NO: 292037 - DNA, 25 bp, probe
tatgctatgattaaatttacttatg

SEQ ID NO: 292038 - DNA, 25 bp, probe
tatgcttgcttatcttaatttgatc

SEQ ID NO: 292039 - DNA, 25 bp, probe
tatcatcacttatctggtatttgca

SEQ ID NO: 292040 - DNA, 25 bp, probe
tatgccactccatctggacatttaa

SEQ ID NO: 292041 - DNA, 25 bp, probe
tataaccacatgtttgacagcggaa

SEQ ID NO: 292042 - DNA, 25 bp, probe
tataaccacatgtttgacagcggaa

SEQ ID NO: 292043 - DNA, 25 bp, probe
tataatactctgttgtactatggaa

SEQ ID NO: 292044 - DNA, 25 bp, probe
tatcaccattcttatgtcactttag

SEQ ID NO: 292045 - DNA, 25 bp, probe
tatcccatatatagttcagccttaa

SEQ ID NO: 292046 - DNA, 25 bp, probe
tattgccactgtgcttggacttaga

SEQ ID NO: 292047 - DNA, 25 bp, probe
tattggacttggggtgacactcagg

SEQ ID NO: 292048 - DNA, 25 bp, probe
tatttattgggaacccctgcagggc

SEQ ID NO: 292049 - DNA, 25 bp, probe
tatattgcttttgtcccaaagtgag

SEQ ID NO: 292050 - DNA, 25 bp, probe
tatttgcttagtttccgtttgggct

SEQ ID NO: 292051 - DNA, 25 bp, probe
ttttggcaagtctttcgtctttgca

SEQ ID NO: 292052 - DNA, 25 bp, probe
tatttggcaactgtgggcaataata

SEQ ID NO: 292053 - DNA, 25 bp, probe
tatatgggatagaaatggcagcaaa

SEQ ID NO: 292054 - DNA, 25 bp, probe
tatatgggatagaaatggcagcaaa

SEQ ID NO: 292055 - DNA, 25 bp, probe
tataaggagcaagggcgcacagagc

SEQ ID NO: 292056 - DNA, 25 bp, probe
tatgaacggcacagaggcggcgcag

SEQ ID NO: 292057 - DNA, 25 bp, probe
tatacggagcacttcatggcggccg

SEQ ID NO: 292058 - DNA, 25 bp, probe
tatacaaagccacctagggcctggg

SEQ ID NO: 292059 - DNA, 25 bp, probe
tataatacagcctttagagcagcct

SEQ ID NO: 292060 - DNA, 25 bp, probe
tatatcattggattttatggagcat

SEQ ID NO: 292061 - DNA, 25 bp, probe
tatacagtacctttctcagacattt

SEQ ID NO: 292062 - DNA, 25 bp, probe
tatacagtacctttctcagacattt

SEQ ID NO: 292063 - DNA, 25 bp, probe
tatccagtaagtagaattatctctt

SEQ ID NO: 292064 - DNA, 25 bp, probe
tatgctgattattttagtctatttt

SEQ ID NO: 292065 - DNA, 25 bp, probe
tatctatatctgcataatgtttgtt

SEQ ID NO: 292066 - DNA, 25 bp, probe
tatgctgcctctgtaaattcatgta

SEQ ID NO: 292067 - DNA, 25 bp, probe
tttgccttcctggaattcttattcc

SEQ ID NO: 292068 - DNA, 25 bp, probe
tttcccttagttatttgattccctg

SEQ ID NO: 292069 - DNA, 25 bp, probe
tttcccttagttatttgattccctg

SEQ ID NO: 292070 - DNA, 25 bp, probe
tttcccctttatgtgaatgtttttg

SEQ ID NO: 292071 - DNA, 25 bp, probe
tttcccctttatgtgaatgtttttg

SEQ ID NO: 292072 - DNA, 25 bp, probe
tatttccctaacatgtccttttttg

SEQ ID NO: 292073 - DNA, 25 bp, probe
tatttaaaaagctggtttgtggttg

SEQ ID NO: 292074 - DNA, 25 bp, probe
tatttaaaaagctggtttgtggttg

SEQ ID NO: 292075 - DNA, 25 bp, probe
tatttcaccaagcggagttgggctt

SEQ ID NO: 292076 - DNA, 25 bp, probe
tatttatatctcacaggagttggtt

SEQ ID NO: 292077 - DNA, 25 bp, probe
tattttacctagctaattatttaat

SEQ ID NO: 292078 - DNA, 25 bp, probe
tattttgaaaagcttcttaattaat

SEQ ID NO: 292079 - DNA, 25 bp, probe
tattcaagaaatctgttcatgttaa

SEQ ID NO: 292080 - DNA, 25 bp, probe
tattaaactctcctttgatattatg

SEQ ID NO: 292081 - DNA, 25 bp, probe
tttgtacacctccttctatgtaagg

SEQ ID NO: 292082 - DNA, 25 bp, probe
tatgctggatacccatttttgtagt

SEQ ID NO: 292083 - DNA, 25 bp, probe
tatgctggatacccatttttgtagt

SEQ ID NO: 292084 - DNA, 25 bp, probe
tatcgctaaaccttactgtgaattt

SEQ ID NO: 292085 - DNA, 25 bp, probe
tatcgctaaaccttactgtgaattt

SEQ ID NO: 292086 - DNA, 25 bp, probe
tatcactgcaacacctacaagtttt

SEQ ID NO: 292087 - DNA, 25 bp, probe
tatcaacaacttgtgacatgagatt

SEQ ID NO: 292088 - DNA, 25 bp, probe
tataccaccttcaatatcgagttcc

SEQ ID NO: 292089 - DNA, 25 bp, probe
tatactacaactcaatgcaatcttt

SEQ ID NO: 292090 - DNA, 25 bp, probe
tataaagaaatgtggccatgcttta

SEQ ID NO: 292091 - DNA, 25 bp, probe
tatacaaaaatgttatgctattctt

SEQ ID NO: 292092 - DNA, 25 bp, probe
tatgaaaattaagatgccttctaga

SEQ ID NO: 292093 - DNA, 25 bp, probe
tataaacctgaaaatcgccctaagt

SEQ ID NO: 292094 - DNA, 25 bp, probe
tataaatcctggtgtatgctcctta

SEQ ID NO: 292095 - DNA, 25 bp, probe
tatgaagactctagacgtttacttt

SEQ ID NO: 292096 - DNA, 25 bp, probe
tataaaccccatagctctgtatttt

SEQ ID NO: 292097 - DNA, 25 bp, probe
tatcaaagactcattgcttaattct

SEQ ID NO: 292098 - DNA, 25 bp, probe
tatcacagagatccagtctattcaa

SEQ ID NO: 292099 - DNA, 25 bp, probe
tatccagagatgtcttccttgtagg

SEQ ID NO: 292100 - DNA, 25 bp, probe
tatccagagatgtcttccttgtagg

SEQ ID NO: 292101 - DNA, 25 bp, probe
tatagagatgtgtcccaatttcaag

SEQ ID NO: 292102 - DNA, 25 bp, probe
tatagcgagctctactaagtacagg

SEQ ID NO: 292103 - DNA, 25 bp, probe
tatccgatgtgctacatgagatgga

SEQ ID NO: 292104 - DNA, 25 bp, probe
tatccgatgtgctacatgagatgga

SEQ ID NO: 292105 - DNA, 25 bp, probe
tatgctaagtgctctggggcacacc

SEQ ID NO: 292106 - DNA, 25 bp, probe
tatgctaagtgctctggggcacacc

SEQ ID NO: 292107 - DNA, 25 bp, probe
tatgctaggctgcactctgctaatc

SEQ ID NO: 292108 - DNA, 25 bp, probe
tatctagttaccaatgctgcagtcc

SEQ ID NO: 292109 - DNA, 25 bp, probe
tatctgatgtgatgcctgttgagtc

SEQ ID NO: 292110 - DNA, 25 bp, probe
tatctgatgtgatgcctgttgagtc

SEQ ID NO: 292111 - DNA, 25 bp, probe
tatctaacatctggctgttgagtga

SEQ ID NO: 292112 - DNA, 25 bp, probe
tattaatcacgcgatgttgactgca

SEQ ID NO: 292113 - DNA, 25 bp, probe
tttgaaccctcatggaataccttta

SEQ ID NO: 292114 - DNA, 25 bp, probe
tatttacctctttggcagtacagat

SEQ ID NO: 292115 - DNA, 25 bp, probe
tatttacttcatttgccaatcagag

SEQ ID NO: 292116 - DNA, 25 bp, probe
tatttgaatgtttatggcacctgac

SEQ ID NO: 292117 - DNA, 25 bp, probe
tatgcttgacagctttgaaactgat

SEQ ID NO: 292118 - DNA, 25 bp, probe
tatctgtggcactcttcagtacatg

SEQ ID NO: 292119 - DNA, 25 bp, probe
tatctgtggcactcttcagtacatg

SEQ ID NO: 292120 - DNA, 25 bp, probe
tattgcaagacggcttctcgcacat

SEQ ID NO: 292121 - DNA, 25 bp, probe
tatctgaggcagctattccgcattc

SEQ ID NO: 292122 - DNA, 25 bp, probe
tatacagcgcagttgtttccattcc

SEQ ID NO: 292123 - DNA, 25 bp, probe
tatacagcgcagttgtttccattcc

SEQ ID NO: 292124 - DNA, 25 bp, probe
tataacctgagttactcctctgctc

SEQ ID NO: 292125 - DNA, 25 bp, probe
tataactcatacaaatctcccttca

SEQ ID NO: 292126 - DNA, 25 bp, probe
tatcgaactacagtcatctctcact

SEQ ID NO: 292127 - DNA, 25 bp, probe
tatcagcagacactccagtttgccc

SEQ ID NO: 292128 - DNA, 25 bp, probe
tatcacaggcaaccagttggcctca

SEQ ID NO: 292129 - DNA, 25 bp, probe
tatcacactcacacagttgactatc

SEQ ID NO: 292130 - DNA, 25 bp, probe
tatcacactcacacagttgactatc

SEQ ID NO: 292131 - DNA, 25 bp, probe
tatagcctccattcatggtgcactt

SEQ ID NO: 292132 - DNA, 25 bp, probe
tatcagctgccatattacgacttag

SEQ ID NO: 292133 - DNA, 25 bp, probe
tatacgccagtataagcactttgaa

SEQ ID NO: 292134 - DNA, 25 bp, probe
tataaactgaattaggcagtcttaa

SEQ ID NO: 292135 - DNA, 25 bp, probe
ttcaaatgctaaatatggtcgttac

SEQ ID NO: 292136 - DNA, 25 bp, probe
tatacaatgtaactatggtggtcgt

SEQ ID NO: 292137 - DNA, 25 bp, probe
tattcaatgtaatgggatttcctgc

SEQ ID NO: 292138 - DNA, 25 bp, probe
tatgccaagtataacctggtttcgt

SEQ ID NO: 292139 - DNA, 25 bp, probe
tatgccaagctgataactactgact

SEQ ID NO: 292140 - DNA, 25 bp, probe
tatgccacacataaaattcattaca

SEQ ID NO: 292141 - DNA, 25 bp, probe
tatgctcacacaacagtttcaacaa

SEQ ID NO: 292142 - DNA, 25 bp, probe
tatgcccacaacattgctgaggaga

SEQ ID NO: 292143 - DNA, 25 bp, probe
tatgcccacaacattgctgaggaga

SEQ ID NO: 292144 - DNA, 25 bp, probe
tatgcagagccattcttggaaggaa

SEQ ID NO: 292145 - DNA, 25 bp, probe
tatccagcctgttgggaatggaccc

SEQ ID NO: 292146 - DNA, 25 bp, probe
tatcgacctaatggaaatgggaaga

SEQ ID NO: 292147 - DNA, 25 bp, probe
tatcatccctaatgtagcaggggga

SEQ ID NO: 292148 - DNA, 25 bp, probe
tatcatccctaatgtagcaggggga

SEQ ID NO: 292149 - DNA, 25 bp, probe
tatatctccaacaaggtgtgggtgg

SEQ ID NO: 292150 - DNA, 25 bp, probe
tatatctccaacaaggtgtgggtgg

SEQ ID NO: 292151 - DNA, 25 bp, probe
tatagctccaaccaatgctgtgcct

SEQ ID NO: 292152 - DNA, 25 bp, probe
tatagctccaaccaatgctgtgcct

SEQ ID NO: 292153 - DNA, 25 bp, probe
tatcattctcaaatgcggcttcgct

SEQ ID NO: 292154 - DNA, 25 bp, probe
tatgctatctacctggaatctctct

SEQ ID NO: 292155 - DNA, 25 bp, probe
tatctactactgtgaagtcagctgt

SEQ ID NO: 292156 - DNA, 25 bp, probe
tatcctatcacttgaatatgtcagg

SEQ ID NO: 292157 - DNA, 25 bp, probe
tatcctatcacttgaatatgtcagg

SEQ ID NO: 292158 - DNA, 25 bp, probe
tatcgctctgcacagctatgagccc

SEQ ID NO: 292159 - DNA, 25 bp, probe
tatctgctatgggactattgctgtg

SEQ ID NO: 292160 - DNA, 25 bp, probe
tatgcctgacaggaacagtctgtgg

SEQ ID NO: 292161 - DNA, 25 bp, probe
tatcgctacaataccagtgctggga

SEQ ID NO: 292162 - DNA, 25 bp, probe
tatcctacagatgatgcgagtggct

SEQ ID NO: 292163 - DNA, 25 bp, probe
tatcttcatggaaatggactgactt

SEQ ID NO: 292164 - DNA, 25 bp, probe
tattacaggatctatgtaggtgttg

SEQ ID NO: 292165 - DNA, 25 bp, probe
tataacagtgccttaaggtatgatg

SEQ ID NO: 292166 - DNA, 25 bp, probe
tataaagtaatattcaggatgatga

SEQ ID NO: 292167 - DNA, 25 bp, probe
tattcagagtaacacaggattcact

SEQ ID NO: 292168 - DNA, 25 bp, probe
tatccaagaaaggactgggaagctg

SEQ ID NO: 292169 - DNA, 25 bp, probe
tatgccatcaaatgaggggaggaag

SEQ ID NO: 292170 - DNA, 25 bp, probe
tatccatcactgggagtgtgggaga

SEQ ID NO: 292171 - DNA, 25 bp, probe
tatcccagcttgctgaggggcaggg

SEQ ID NO: 292172 - DNA, 25 bp, probe
tatgcgaagttgctaggcctgctgg

SEQ ID NO: 292173 - DNA, 25 bp, probe
tatgccactgttattccactgggac

SEQ ID NO: 292174 - DNA, 25 bp, probe
tattagctgtagagtccttggcaaa

SEQ ID NO: 292175 - DNA, 25 bp, probe
tattaaaagctggtcttgtggaaaa

SEQ ID NO: 292176 - DNA, 25 bp, probe
tatattaaagttgctgcagttaaaa

SEQ ID NO: 292177 - DNA, 25 bp, probe
tatttaggaattcctctgttttatg

SEQ ID NO: 292178 - DNA, 25 bp, probe
tattaggggtgtccgtgtaattgac

SEQ ID NO: 292179 - DNA, 25 bp, probe
tattaggggtgtccgtgtaattgac

SEQ ID NO: 292180 - DNA, 25 bp, probe
tattaggggctacagtggcaaggag

SEQ ID NO: 292181 - DNA, 25 bp, probe
tatattaggggctacagtggcaagg

SEQ ID NO: 292182 - DNA, 25 bp, probe
tatctgatggaccccagcgggaacg

SEQ ID NO: 292183 - DNA, 25 bp, probe
tatccgagagcagctaaaggacctg

SEQ ID NO: 292184 - DNA, 25 bp, probe
tatccagagcgagcgcttcagggcc

SEQ ID NO: 292185 - DNA, 25 bp, probe
tatcatcagagcgccgaggagagtg

SEQ ID NO: 292186 - DNA, 25 bp, probe
tatctctgagtccaccagaagttgt

SEQ ID NO: 292187 - DNA, 25 bp, probe
tatctatggtcccctgaaattttga

SEQ ID NO: 292188 - DNA, 25 bp, probe
tattctggatcctcgtggattttga

SEQ ID NO: 292189 - DNA, 25 bp, probe
tattctggatcctcgtggattttga

SEQ ID NO: 292190 - DNA, 25 bp, probe
tattcctctcccaggtgtttgtggg

SEQ ID NO: 292191 - DNA, 25 bp, probe
tattttctggtgaggtgggtttggg

SEQ ID NO: 292192 - DNA, 25 bp, probe
tattttggtcacagggtggttttgg

SEQ ID NO: 292193 - DNA, 25 bp, probe
tatcatttttccaaccttggtattt

SEQ ID NO: 292194 - DNA, 25 bp, probe
tatcatttttccaaccttggtattt

SEQ ID NO: 292195 - DNA, 25 bp, probe
tataaccattacatgtttaaattgt

SEQ ID NO: 292196 - DNA, 25 bp, probe
tattacctattagttttggagttct

SEQ ID NO: 292197 - DNA, 25 bp, probe
tattacctaaactatcttgtggagt

SEQ ID NO: 292198 - DNA, 25 bp, probe
tattaacagaaattcatatttggtg

SEQ ID NO: 292199 - DNA, 25 bp, probe
tttgaagctgaatatatacgtagtc

SEQ ID NO: 292200 - DNA, 25 bp, probe
tttaaccattaaaactgaagtctga

SEQ ID NO: 292201 - DNA, 25 bp, probe
tttaaccattaaaactgaagtctga

SEQ ID NO: 292202 - DNA, 25 bp, probe
tttaacctcctaagtatcaagtata

SEQ ID NO: 292203 - DNA, 25 bp, probe
tttacagctcccatcgtaaggacgg

SEQ ID NO: 292204 - DNA, 25 bp, probe
tttggagtcccttgaatcaaccagc

SEQ ID NO: 292205 - DNA, 25 bp, probe
tattggagacttcagagtaaccagc

SEQ ID NO: 292206 - DNA, 25 bp, probe
tttgctggagttcagggaactactt

SEQ ID NO: 292207 - DNA, 25 bp, probe
ttggcggaggggtggaaaatcagtt

SEQ ID NO: 292208 - DNA, 25 bp, probe
tttggcggaggggtggaaaatcagt

SEQ ID NO: 292209 - DNA, 25 bp, probe
tttggcctggcacggaggtataacc

SEQ ID NO: 292210 - DNA, 25 bp, probe
tataacctggacgtgagctgtcaga

SEQ ID NO: 292211 - DNA, 25 bp, probe
tattcaccgtgatctgagggcagca

SEQ ID NO: 292212 - DNA, 25 bp, probe
tatccaccagtcggtgagtgagcag

SEQ ID NO: 292213 - DNA, 25 bp, probe
tattcaacaggagggcggaagtaga

SEQ ID NO: 292214 - DNA, 25 bp, probe
tttaactggaactgcaagatatatg

SEQ ID NO: 292215 - DNA, 25 bp, probe
tatctgaactggactagtgaaaaat

SEQ ID NO: 292216 - DNA, 25 bp, probe
tattaacagccagagtcataaatga

SEQ ID NO: 292217 - DNA, 25 bp, probe
tattaacagccagagtcataaatga

SEQ ID NO: 292218 - DNA, 25 bp, probe
tatctggaaccagcaatcatttaaa

SEQ ID NO: 292219 - DNA, 25 bp, probe
tatgctgaaacatccacacattgta

SEQ ID NO: 292220 - DNA, 25 bp, probe
tatcctaaatacaacctctgtgcag

SEQ ID NO: 292221 - DNA, 25 bp, probe
tatcaaggaaacacagctcttcacc

SEQ ID NO: 292222 - DNA, 25 bp, probe
tatcacaaaaacactgctctgcatt

SEQ ID NO: 292223 - DNA, 25 bp, probe
tatactgaaggaatttgtgctgtgt

SEQ ID NO: 292224 - DNA, 25 bp, probe
tatactaagggagttcattgatttg

SEQ ID NO: 292225 - DNA, 25 bp, probe
tttgacattgggaaccatttttgtg

SEQ ID NO: 292226 - DNA, 25 bp, probe
tttactaaggtgtgctgggtcatgt

SEQ ID NO: 292227 - DNA, 25 bp, probe
tattaccaggggtttggccattgct

SEQ ID NO: 292228 - DNA, 25 bp, probe
tatatagccgagctgttcttccttc

SEQ ID NO: 292229 - DNA, 25 bp, probe
tttgggtatggtttgcttgccccca

SEQ ID NO: 292230 - DNA, 25 bp, probe
tttgggtatggtttgcttgccccca

SEQ ID NO: 292231 - DNA, 25 bp, probe
tatatggtgtgaggtgggaggacac

SEQ ID NO: 292232 - DNA, 25 bp, probe
tatcatggcgtctggggagctcacg

SEQ ID NO: 292233 - DNA, 25 bp, probe
tatctggatatctgctggaagcctc

SEQ ID NO: 292234 - DNA, 25 bp, probe
tatctggatctctgttatgtgccat

SEQ ID NO: 292235 - DNA, 25 bp, probe
tatcaggataattgtctcatgacca

SEQ ID NO: 292236 - DNA, 25 bp, probe
tatcgtggaaggactcatgaccaca

SEQ ID NO: 292237 - DNA, 25 bp, probe
tatactgtgatacctccaacactca

SEQ ID NO: 292238 - DNA, 25 bp, probe
tattctgagtacttgcccaactctg

SEQ ID NO: 292239 - DNA, 25 bp, probe
tatatcatcctttggcatcccaact

SEQ ID NO: 292240 - DNA, 25 bp, probe
tatacatggcttttgctcacactga

SEQ ID NO: 292241 - DNA, 25 bp, probe
tatactggcatttcagatccacccc

SEQ ID NO: 292242 - DNA, 25 bp, probe
tatcactgtcatgaagatgccttcc

SEQ ID NO: 292243 - DNA, 25 bp, probe
tatcactgtcatgaagatgccttcc

SEQ ID NO: 292244 - DNA, 25 bp, probe
tatcctacacaatgatccttcacgc

SEQ ID NO: 292245 - DNA, 25 bp, probe
tataaactcaagtgcctgctacaca

SEQ ID NO: 292246 - DNA, 25 bp, probe
tataatgatctctttcgcagttaaa

SEQ ID NO: 292247 - DNA, 25 bp, probe
tataatgatctcttttgcagttaga

SEQ ID NO: 292248 - DNA, 25 bp, probe
tataattcacttgggcagcgaggat

SEQ ID NO: 292249 - DNA, 25 bp, probe
tatacatttcttactgccgattgct

SEQ ID NO: 292250 - DNA, 25 bp, probe
tatacctactttacccatgatgaaa

SEQ ID NO: 292251 - DNA, 25 bp, probe
tatacctccatgtttctaagtaata

SEQ ID NO: 292252 - DNA, 25 bp, probe
tatcaccttgtgttcctaatctaaa

SEQ ID NO: 292253 - DNA, 25 bp, probe
tatgccctatctggattctacttat

SEQ ID NO: 292254 - DNA, 25 bp, probe
tatgcccgttggtctatgattgaca

SEQ ID NO: 292255 - DNA, 25 bp, probe
tatgccctttggactgtcaggtcca

SEQ ID NO: 292256 - DNA, 25 bp, probe
tatccagctttgttgctgctctggt

SEQ ID NO: 292257 - DNA, 25 bp, probe
tatccagctttgttgctgctctggt

SEQ ID NO: 292258 - DNA, 25 bp, probe
tatgcccgtatgtgcgtgcatgtgt

SEQ ID NO: 292259 - DNA, 25 bp, probe
tatccttgtgagtacgtgatggttc

SEQ ID NO: 292260 - DNA, 25 bp, probe
tatgcgctcaataaacgtgtttctc

SEQ ID NO: 292261 - DNA, 25 bp, probe
tatagctgcgtatcacgcttctctt

SEQ ID NO: 292262 - DNA, 25 bp, probe
tatagctgtagatgggcttcacatc

SEQ ID NO: 292263 - DNA, 25 bp, probe
tattgcctcagtggaggcgctccgc

SEQ ID NO: 292264 - DNA, 25 bp, probe
tattgcctcagtggaggcgctccgc

SEQ ID NO: 292265 - DNA, 25 bp, probe
tatccctcatgtgatgcctgtaaaa

SEQ ID NO: 292266 - DNA, 25 bp, probe
tatgccctgaacatgctcttacaaa

SEQ ID NO: 292267 - DNA, 25 bp, probe
tatctcggacacatcttgtgacaag

SEQ ID NO: 292268 - DNA, 25 bp, probe
tatcgtggaccttttgtgaacattt

SEQ ID NO: 292269 - DNA, 25 bp, probe
tatcgtggaccttttgtgaacattt

SEQ ID NO: 292270 - DNA, 25 bp, probe
tatacttagcgtttttaacttatat

SEQ ID NO: 292271 - DNA, 25 bp, probe
tatccctatcttctttttcatgtaa

SEQ ID NO: 292272 - DNA, 25 bp, probe
tatcccagactgtcttttatcttta

SEQ ID NO: 292273 - DNA, 25 bp, probe
tatatccaactttttgtaaatatac

SEQ ID NO: 292274 - DNA, 25 bp, probe
tattcaacacttcataagaaaatag

SEQ ID NO: 292275 - DNA, 25 bp, probe
tattcagtccttcttggaagactac

SEQ ID NO: 292276 - DNA, 25 bp, probe
tatacattctcgactttggggatta

SEQ ID NO: 292277 - DNA, 25 bp, probe
tataagtattggtttgggtgttcct

SEQ ID NO: 292278 - DNA, 25 bp, probe
tataatggatatgttgcgggtattc

SEQ ID NO: 292279 - DNA, 25 bp, probe
tatcattggattttatggagcattt

SEQ ID NO: 292280 - DNA, 25 bp, probe
tatctgtttgtgtttgggtgatcat

SEQ ID NO: 292281 - DNA, 25 bp, probe
tatctctttctgtatctataggtaa

SEQ ID NO: 292282 - DNA, 25 bp, probe
tatctcttcagtctctataccaata

SEQ ID NO: 292283 - DNA, 25 bp, probe
tatctctaagttacatgacctatat

SEQ ID NO: 292284 - DNA, 25 bp, probe
tattcatatattcaagaccatgtat

SEQ ID NO: 292285 - DNA, 25 bp, probe
tattcatatattcaagaccatgtat

SEQ ID NO: 292286 - DNA, 25 bp, probe
tattctatactgtgatacctccaac

SEQ ID NO: 292287 - DNA, 25 bp, probe
tattctaaattatttcctcaccatc

SEQ ID NO: 292288 - DNA, 25 bp, probe
tattctaagttagactcttcccctc

SEQ ID NO: 292289 - DNA, 25 bp, probe
tatattaatgttttcattttcccca

SEQ ID NO: 292290 - DNA, 25 bp, probe
tatttaagcgtctctgtttacctgc

SEQ ID NO: 292291 - DNA, 25 bp, probe
tattgtaagttatctgtatttagca

SEQ ID NO: 292292 - DNA, 25 bp, probe
tatccaaaattatctctgtttactt

SEQ ID NO: 292293 - DNA, 25 bp, probe
tataattatttacctctttggcagt

SEQ ID NO: 292294 - DNA, 25 bp, probe
tattattatggatcccttgggctgt

SEQ ID NO: 292295 - DNA, 25 bp, probe
tattattatggatcccttgggctgt

SEQ ID NO: 292296 - DNA, 25 bp, probe
tatattcttacatacctttagtgga

SEQ ID NO: 292297 - DNA, 25 bp, probe
ttacctccacaaccctatttgttat

SEQ ID NO: 292298 - DNA, 25 bp, probe
tttcctagacgaacctgttgtggac

SEQ ID NO: 292299 - DNA, 25 bp, probe
tttcctagacgaacctgttgtggac

SEQ ID NO: 292300 - DNA, 25 bp, probe
ttttatagtcgtgccatgttgttac

SEQ ID NO: 292301 - DNA, 25 bp, probe
tattttagacattcctcgtcagtat

SEQ ID NO: 292302 - DNA, 25 bp, probe
tattttaacttccttggactcattt

SEQ ID NO: 292303 - DNA, 25 bp, probe
tatctttagacttcacttgtggttt

SEQ ID NO: 292304 - DNA, 25 bp, probe
tatagttcagccttaatattgtttt

SEQ ID NO: 292305 - DNA, 25 bp, probe
tatagttccctcacttgattttttt

SEQ ID NO: 292306 - DNA, 25 bp, probe
tatagttccctcacttgattttttt

SEQ ID NO: 292307 - DNA, 25 bp, probe
tatacttccgtctcgatgctgttaa

SEQ ID NO: 292308 - DNA, 25 bp, probe
tatacttccgtctcgatgctgttaa

SEQ ID NO: 292309 - DNA, 25 bp, probe
tatacttacttctggcataactaaa

SEQ ID NO: 292310 - DNA, 25 bp, probe
tataccttccttaaggtactcaaca

SEQ ID NO: 292311 - DNA, 25 bp, probe
tatactctgaccacaagaccattta

SEQ ID NO: 292312 - DNA, 25 bp, probe
tatcagtcggtgacgatcaggccct

SEQ ID NO: 292313 - DNA, 25 bp, probe
tatcaactgtcatcggcaggtcctt

SEQ ID NO: 292314 - DNA, 25 bp, probe
tataccactgcattgggacgtctgc

SEQ ID NO: 292315 - DNA, 25 bp, probe
tatacccttatggggtgtcgcctgg

SEQ ID NO: 292316 - DNA, 25 bp, probe
tatcccgtttcaaggctgtaattct

SEQ ID NO: 292317 - DNA, 25 bp, probe
tatcccgtttcaaggctgtaattct

SEQ ID NO: 292318 - DNA, 25 bp, probe
tatcctagtggtaatggttatatgt

SEQ ID NO: 292319 - DNA, 25 bp, probe
tatcccactgggttgggattatgct

SEQ ID NO: 292320 - DNA, 25 bp, probe
tatactcacgaggaatggcctttct

SEQ ID NO: 292321 - DNA, 25 bp, probe
ttttactgaagtatccagttcttag

SEQ ID NO: 292322 - DNA, 25 bp, probe
tattttggcaagtctttcgtctttg

SEQ ID NO: 292323 - DNA, 25 bp, probe
tatttattacgctttccagactttc

SEQ ID NO: 292324 - DNA, 25 bp, probe
tatttattacatcggggcaaatttt

SEQ ID NO: 292325 - DNA, 25 bp, probe
tatcatgttttactgtgcgagaaaa

SEQ ID NO: 292326 - DNA, 25 bp, probe
tattgttgttacaggaacactggca

SEQ ID NO: 292327 - DNA, 25 bp, probe
tattgttgttacaggaacactggca

SEQ ID NO: 292328 - DNA, 25 bp, probe
tatttattgtaccaaagacagtggt

SEQ ID NO: 292329 - DNA, 25 bp, probe
tttcatttggaggataggtcaggtg

SEQ ID NO: 292330 - DNA, 25 bp, probe
tatttttgaggcgaaggcgtctgtc

SEQ ID NO: 292331 - DNA, 25 bp, probe
tatagagttagtggaaggcaagtta

SEQ ID NO: 292332 - DNA, 25 bp, probe
tttgagcttagaaaacccagttaga

SEQ ID NO: 292333 - DNA, 25 bp, probe
tttgagcttagaaaacccagttaga

SEQ ID NO: 292334 - DNA, 25 bp, probe
tttgtcttcgggtgccactgtaaga

SEQ ID NO: 292335 - DNA, 25 bp, probe
tttgtcttcgggtgccactgtaaga

SEQ ID NO: 292336 - DNA, 25 bp, probe
tatctacttggggacagccacgaaa

SEQ ID NO: 292337 - DNA, 25 bp, probe
tatctaccgccggggagccagaaga

SEQ ID NO: 292338 - DNA, 25 bp, probe
tatctaccgccggggagccagaaga

SEQ ID NO: 292339 - DNA, 25 bp, probe
tatcccttcccggatgatccgaaag

SEQ ID NO: 292340 - DNA, 25 bp, probe
tatcccttcccggatgatccgaaag

SEQ ID NO: 292341 - DNA, 25 bp, probe
tatccgttccatgggtgaaggtaca

SEQ ID NO: 292342 - DNA, 25 bp, probe
ttcactttcctgggtaaggagtact

SEQ ID NO: 292343 - DNA, 25 bp, probe
tatactgtttctgcaatggcgaggt

SEQ ID NO: 292344 - DNA, 25 bp, probe
tatctgtgttttgaatggtgttgta

SEQ ID NO: 292345 - DNA, 25 bp, probe
ggtagcctagaacagctaagaccac

SEQ ID NO: 292346 - DNA, 25 bp, probe
tataagctgctttagctggggttct

SEQ ID NO: 292347 - DNA, 25 bp, probe
tatattgtgctttttggaggttcta

SEQ ID NO: 292348 - DNA, 25 bp, probe
tatcattgtcttcctccaaggagtt

SEQ ID NO: 292349 - DNA, 25 bp, probe
tatcctgttctgctacgtggagatc

SEQ ID NO: 292350 - DNA, 25 bp, probe
tatctagtactgcaactgccagaac

SEQ ID NO: 292351 - DNA, 25 bp, probe
tatcatcgtctacatttccagcaac

SEQ ID NO: 292352 - DNA, 25 bp, probe
tatcatcgttgactctttgcaaagg

SEQ ID NO: 292353 - DNA, 25 bp, probe
tatcatcaggtcttacattcacatc

SEQ ID NO: 292354 - DNA, 25 bp, probe
tatatagagtctgcctccaatcctg

SEQ ID NO: 292355 - DNA, 25 bp, probe
tatcatgaagactctctatcaccca

SEQ ID NO: 292356 - DNA, 25 bp, probe
tatcatgtcagacaccttcagccac

SEQ ID NO: 292357 - DNA, 25 bp, probe
tatatgtgggtagtattccagcatc

SEQ ID NO: 292358 - DNA, 25 bp, probe
tatcctgtggtagtaccgcatctct

SEQ ID NO: 292359 - DNA, 25 bp, probe
ttcgtggagtcagaactgcctctga

SEQ ID NO: 292360 - DNA, 25 bp, probe
tttgtggggcatcaggtgctccgaa

SEQ ID NO: 292361 - DNA, 25 bp, probe
tattaggacgactcagtatccgaga

SEQ ID NO: 292362 - DNA, 25 bp, probe
tattattcctaccgaaatccgcaac

SEQ ID NO: 292363 - DNA, 25 bp, probe
tatttctactacatctaatgaccac

SEQ ID NO: 292364 - DNA, 25 bp, probe
tattctatagttattaagttcttta

SEQ ID NO: 292365 - DNA, 25 bp, probe
tattctatagttattaagttcttta

SEQ ID NO: 292366 - DNA, 25 bp, probe
tattctttggtccctcaatttttct

SEQ ID NO: 292367 - DNA, 25 bp, probe
tattctttggtccctcaatttttct

SEQ ID NO: 292368 - DNA, 25 bp, probe
tatttctggtgtccccaatcactat

SEQ ID NO: 292369 - DNA, 25 bp, probe
tatttctggtgtccccaatcactat

SEQ ID NO: 292370 - DNA, 25 bp, probe
tatcttgggatttttcacaactgat

SEQ ID NO: 292371 - DNA, 25 bp, probe
tatcttgggatttttcacaactgat

SEQ ID NO: 292372 - DNA, 25 bp, probe
tattaggatattgctcaaaattata

SEQ ID NO: 292373 - DNA, 25 bp, probe
tattgaggtgtaattgcacaagtaa

SEQ ID NO: 292374 - DNA, 25 bp, probe
tattcaggattgcttgaaaggtgca

SEQ ID NO: 292375 - DNA, 25 bp, probe
tattagcaagcgccccaaactggaa

SEQ ID NO: 292376 - DNA, 25 bp, probe
tattagcaagcgccccaaactggaa

SEQ ID NO: 292377 - DNA, 25 bp, probe
tattacaataacaccacctgaaaaa

SEQ ID NO: 292378 - DNA, 25 bp, probe
tttcctaatccatacaccagggtaa

SEQ ID NO: 292379 - DNA, 25 bp, probe
tttcaacctaatgaccataagacta

SEQ ID NO: 292380 - DNA, 25 bp, probe
ttggaagcctggagtgcctaagcct

SEQ ID NO: 292381 - DNA, 25 bp, probe
ttggaagcctggagtgcctaagcct

SEQ ID NO: 292382 - DNA, 25 bp, probe
tttctacttggagggcctggacctc

SEQ ID NO: 292383 - DNA, 25 bp, probe
tatttgacctggatgcaccagggcc

SEQ ID NO: 292384 - DNA, 25 bp, probe
tattgggcgcctggtcaccagggct

SEQ ID NO: 292385 - DNA, 25 bp, probe
tattgtacggctggctttgcaggcc

SEQ ID NO: 292386 - DNA, 25 bp, probe
tatcaaagctgccaacgtgctgctc

SEQ ID NO: 292387 - DNA, 25 bp, probe
tatcaatcctcttttgatgtctgca

SEQ ID NO: 292388 - DNA, 25 bp, probe
tatcttctccattctagatgcttcc

SEQ ID NO: 292389 - DNA, 25 bp, probe
tatctatcaactataagcccactgt

SEQ ID NO: 292390 - DNA, 25 bp, probe
tatctatcaactataagcccactgt

SEQ ID NO: 292391 - DNA, 25 bp, probe
tatctgaccaatagtacacacacag

SEQ ID NO: 292392 - DNA, 25 bp, probe
tatatgaccacgctcacccgcatga

SEQ ID NO: 292393 - DNA, 25 bp, probe
tatatggcaatggcagttccttctg

SEQ ID NO: 292394 - DNA, 25 bp, probe
tatatggcaatggcagttccttctg

SEQ ID NO: 292395 - DNA, 25 bp, probe
tatatagcaatgcttgcttttctga

SEQ ID NO: 292396 - DNA, 25 bp, probe
tatatagcaatgcttgcttttctga

SEQ ID NO: 292397 - DNA, 25 bp, probe
tatcatgtgcaatgttgtggcttta

SEQ ID NO: 292398 - DNA, 25 bp, probe
tatctgtcgcagcttcagtctttac

SEQ ID NO: 292399 - DNA, 25 bp, probe
tatctgtcccttcagacatttatcc

SEQ ID NO: 292400 - DNA, 25 bp, probe
tatattggccttctacagctattac

SEQ ID NO: 292401 - DNA, 25 bp, probe
tattttggttgcttgatggctttca

SEQ ID NO: 292402 - DNA, 25 bp, probe
tatttaggaacatatgctcatttga

SEQ ID NO: 292403 - DNA, 25 bp, probe
tatactaactactagtgctgcattt

SEQ ID NO: 292404 - DNA, 25 bp, probe
tatagtcagtcttcaggatgtgctt

SEQ ID NO: 292405 - DNA, 25 bp, probe
tatagtcagtcttcaggatgtgctt

SEQ ID NO: 292406 - DNA, 25 bp, probe
tatagtcttgaagggcttgttttga

SEQ ID NO: 292407 - DNA, 25 bp, probe
tattactatgagtcaggctctgttt

SEQ ID NO: 292408 - DNA, 25 bp, probe
tattaccatgcagtcaggattctcc

SEQ ID NO: 292409 - DNA, 25 bp, probe
tgattttaactctgtcttcacctga

SEQ ID NO: 292410 - DNA, 25 bp, probe
tatcttcacacattctgatcttctc

SEQ ID NO: 292411 - DNA, 25 bp, probe
tatcatttcagcttcttcatggcca

SEQ ID NO: 292412 - DNA, 25 bp, probe
tatcatttcagcttcttcatggcca

SEQ ID NO: 292413 - DNA, 25 bp, probe
tatctttaaatccttgagcaatctg

SEQ ID NO: 292414 - DNA, 25 bp, probe
tattcttactaccttggggctaaag

SEQ ID NO: 292415 - DNA, 25 bp, probe
tattcttcatgtatgggaagcctaa

SEQ ID NO: 292416 - DNA, 25 bp, probe
tattttcatgtatgctcgacctcga

SEQ ID NO: 292417 - DNA, 25 bp, probe
tatcttcatttatgctcggccaaag

SEQ ID NO: 292418 - DNA, 25 bp, probe
tatctgtttttcctcaggcacatca

SEQ ID NO: 292419 - DNA, 25 bp, probe
tatttctctttcacggaacaatccc

SEQ ID NO: 292420 - DNA, 25 bp, probe
tatttttttaactttaccatgctca

SEQ ID NO: 292421 - DNA, 25 bp, probe
tattctgttttgttaatatacccca

SEQ ID NO: 292422 - DNA, 25 bp, probe
tattctgtatagcctaactacacac

SEQ ID NO: 292423 - DNA, 25 bp, probe
tattttaaactatcatagccctgct

SEQ ID NO: 292424 - DNA, 25 bp, probe
tttggccgaaatttctacacctgtg

SEQ ID NO: 292425 - DNA, 25 bp, probe
tttggcaggtaaatccaagctccct

SEQ ID NO: 292426 - DNA, 25 bp, probe
ttaccggtagaattcacaccctcta

SEQ ID NO: 292427 - DNA, 25 bp, probe
ttcctagagggaactcagactcctt

SEQ ID NO: 292428 - DNA, 25 bp, probe
tatcttaggggcgtctggccttttt

SEQ ID NO: 292429 - DNA, 25 bp, probe
tatcttaggggcgtctggccttttt

SEQ ID NO: 292430 - DNA, 25 bp, probe
tatctaaaggtgcctttacttttct

SEQ ID NO: 292431 - DNA, 25 bp, probe
ttctacgggaccttattcttcatgt

SEQ ID NO: 292432 - DNA, 25 bp, probe
tataacgcgctcacctattactcgc

SEQ ID NO: 292433 - DNA, 25 bp, probe
tatacacacgtatctcatttttatc

SEQ ID NO: 292434 - DNA, 25 bp, probe
tattacactatctactactatccat

SEQ ID NO: 292435 - DNA, 25 bp, probe
tatcttccaacaatgctgaccacca

SEQ ID NO: 292436 - DNA, 25 bp, probe
tatcttaaatatcctggctcatcca

SEQ ID NO: 292437 - DNA, 25 bp, probe
tatcgagccaatacctactgctcca

SEQ ID NO: 292438 - DNA, 25 bp, probe
tattcagctcaatgcactaatgcct

SEQ ID NO: 292439 - DNA, 25 bp, probe
tatcatcactggctactacatcctt

SEQ ID NO: 292440 - DNA, 25 bp, probe
tatcatcctggggacgtttgctgct

SEQ ID NO: 292441 - DNA, 25 bp, probe
tatcatcctggggacgtttgctgct

SEQ ID NO: 292442 - DNA, 25 bp, probe
tatcttgctgggcatactttctctc

SEQ ID NO: 292443 - DNA, 25 bp, probe
tatcggggggattgcctgtgacatg

SEQ ID NO: 292444 - DNA, 25 bp, probe
tatagtcatggggtccctgctgcaa

SEQ ID NO: 292445 - DNA, 25 bp, probe
tatcatggtggtgtcgtgcatctgc

SEQ ID NO: 292446 - DNA, 25 bp, probe
tatatccatagagatctgcgatcag

SEQ ID NO: 292447 - DNA, 25 bp, probe
tatatccatagagatctgcgatcag

SEQ ID NO: 292448 - DNA, 25 bp, probe
tataggatagacactggacatggcc

SEQ ID NO: 292449 - DNA, 25 bp, probe
tatagaatacacaaagaactggatc

SEQ ID NO: 292450 - DNA, 25 bp, probe
tatagcaatacactgtaatatcaga

SEQ ID NO: 292451 - DNA, 25 bp, probe
tatatgaccatgtctgaaatgtcag

SEQ ID NO: 292452 - DNA, 25 bp, probe
tatagcctctgctgcaaatgctcag

SEQ ID NO: 292453 - DNA, 25 bp, probe
tatacctgtctgacacaatatcacc

SEQ ID NO: 292454 - DNA, 25 bp, probe
tattcatctgttgacaatttgccat

SEQ ID NO: 292455 - DNA, 25 bp, probe
tatctatcttctaaacttggcagtt

SEQ ID NO: 292456 - DNA, 25 bp, probe
tatctgctttttccactttgagttt

SEQ ID NO: 292457 - DNA, 25 bp, probe
tatctgaattttccactctatggat

SEQ ID NO: 292458 - DNA, 25 bp, probe
tatctgaatttatcctctctggctt

SEQ ID NO: 292459 - DNA, 25 bp, probe
tattgaattaatatccctacatgta

SEQ ID NO: 292460 - DNA, 25 bp, probe
tatagtatcaaattgtttctaacca

SEQ ID NO: 292461 - DNA, 25 bp, probe
ttatgcctctaactttttacagcct

SEQ ID NO: 292462 - DNA, 25 bp, probe
tttgcactgtaacatatgccatagc

SEQ ID NO: 292463 - DNA, 25 bp, probe
ttctcagcagtatcgtagccttcgt

SEQ ID NO: 292464 - DNA, 25 bp, probe
tatctcagtgtatcggagcctggca

SEQ ID NO: 292465 - DNA, 25 bp, probe
tattcaattaggggagtctggactt

SEQ ID NO: 292466 - DNA, 25 bp, probe
tatttatctgagcccacaggtggaa

SEQ ID NO: 292467 - DNA, 25 bp, probe
tatttatctgagcccacaggtggaa

SEQ ID NO: 292468 - DNA, 25 bp, probe
tatttctctgacacaaactgttcac

SEQ ID NO: 292469 - DNA, 25 bp, probe
tattctagctactgtaacattgata

SEQ ID NO: 292470 - DNA, 25 bp, probe
tatttccttctagtataattaaatc

SEQ ID NO: 292471 - DNA, 25 bp, probe
tatcttcagcttcataactttccca

SEQ ID NO: 292472 - DNA, 25 bp, probe
tataaacttataaatatttctccag

SEQ ID NO: 292473 - DNA, 25 bp, probe
tataaatcttcaaagcttttttcat

SEQ ID NO: 292474 - DNA, 25 bp, probe
tatcaccatttgtatagcttatttt

SEQ ID NO: 292475 - DNA, 25 bp, probe
tatctgtgcttttgaggctatttct

SEQ ID NO: 292476 - DNA, 25 bp, probe
tatcttctgcatgaacccatatatg

SEQ ID NO: 292477 - DNA, 25 bp, probe
tatttgtgcacgttccagactatgg

SEQ ID NO: 292478 - DNA, 25 bp, probe
tatttgtgcacgttccagactatgg

SEQ ID NO: 292479 - DNA, 25 bp, probe
tttgaggccgtatcagacgaggcca

SEQ ID NO: 292480 - DNA, 25 bp, probe
tttctggctagtgggcagacgcggc

SEQ ID NO: 292481 - DNA, 25 bp, probe
tattctggggcttggagaccgtcat

SEQ ID NO: 292482 - DNA, 25 bp, probe
tattctcgggctgagaaccctgcgt

SEQ ID NO: 292483 - DNA, 25 bp, probe
tatcttgcgggatgagaaggatcta

SEQ ID NO: 292484 - DNA, 25 bp, probe
tatcttgcgggatgagaaggatcta

SEQ ID NO: 292485 - DNA, 25 bp, probe
tatcttgcatccctgtatggaggtc

SEQ ID NO: 292486 - DNA, 25 bp, probe
tatatatgaccatgtctgaaatgtc

SEQ ID NO: 292487 - DNA, 25 bp, probe
tatatggaccatgatctgatgggac

SEQ ID NO: 292488 - DNA, 25 bp, probe
tatagtatcacaaatctgtagtagc

SEQ ID NO: 292489 - DNA, 25 bp, probe
tatagcattcccagtgtcactagaa

SEQ ID NO: 292490 - DNA, 25 bp, probe
tatatatgtccctggtacatataca

SEQ ID NO: 292491 - DNA, 25 bp, probe
tatatatgtccctggtacatataca

SEQ ID NO: 292492 - DNA, 25 bp, probe
tattagttccactgttgctcagcca

SEQ ID NO: 292493 - DNA, 25 bp, probe
tatagtttcctttgtttcaccagag

SEQ ID NO: 292494 - DNA, 25 bp, probe
tatagtctctccaacagtgtattcc

SEQ ID NO: 292495 - DNA, 25 bp, probe
ttgagtcagtagatctggtttccat

SEQ ID NO: 292496 - DNA, 25 bp, probe
ttagtcgttttatgtttctttgcaa

SEQ ID NO: 292497 - DNA, 25 bp, probe
ttagtcgttttatgtttctttgcaa

SEQ ID NO: 292498 - DNA, 25 bp, probe
ttaggaattcctctgttttatggat

SEQ ID NO: 292499 - DNA, 25 bp, probe
tatcaggaaatccatatttattttg

SEQ ID NO: 292500 - DNA, 25 bp, probe
tattggataaggagttattttgata

SEQ ID NO: 292501 - DNA, 25 bp, probe
tatagcttaaagttgctcttttggt

SEQ ID NO: 292502 - DNA, 25 bp, probe
tatagttgtgaacattgcttgtgtg

SEQ ID NO: 292503 - DNA, 25 bp, probe
tatagacgtttggactgatttgtgg

SEQ ID NO: 292504 - DNA, 25 bp, probe
tttgtggtatttgtgatttggttaa

SEQ ID NO: 292505 - DNA, 25 bp, probe
tattgggaatttactgggtgttcta

SEQ ID NO: 292506 - DNA, 25 bp, probe
ttttggagtcatggtccggtgtcct

SEQ ID NO: 292507 - DNA, 25 bp, probe
ttttggagtcatggtccggtgtcct

SEQ ID NO: 292508 - DNA, 25 bp, probe
tatttggagctaggatgtatggtgt

SEQ ID NO: 292509 - DNA, 25 bp, probe
tatcttaagtgaggaggcatgggcc

SEQ ID NO: 292510 - DNA, 25 bp, probe
tatcattaaaggcatggtggagctg

SEQ ID NO: 292511 - DNA, 25 bp, probe
tatcttatctattgggtggtatgtg

SEQ ID NO: 292512 - DNA, 25 bp, probe
tatcttcatgtatccctgttactga

SEQ ID NO: 292513 - DNA, 25 bp, probe
tatcttcatgtatccctgttactga

SEQ ID NO: 292514 - DNA, 25 bp, probe
tatcttcatgtatccctgttactga

SEQ ID NO: 292515 - DNA, 25 bp, probe
tatttatccagcaccgtttctgggc

SEQ ID NO: 292516 - DNA, 25 bp, probe
tatattaggcccctctattttcagg

SEQ ID NO: 292517 - DNA, 25 bp, probe
tatttaccctcagctattcttcagc

SEQ ID NO: 292518 - DNA, 25 bp, probe
tatttttgcagccagttaactttgc

SEQ ID NO: 292519 - DNA, 25 bp, probe
tatttttgcagccagttaactttgc

SEQ ID NO: 292520 - DNA, 25 bp, probe
tatttttctctgctaagaccggcta

SEQ ID NO: 292521 - DNA, 25 bp, probe
tatttatttttgtaacaccagtgtc

SEQ ID NO: 292522 - DNA, 25 bp, probe
tattcacttttatttagcaccaggg

SEQ ID NO: 292523 - DNA, 25 bp, probe
tattagcttttgtttacaccgtgga

SEQ ID NO: 292524 - DNA, 25 bp, probe
tattagcttttgtttacaccgtgga

SEQ ID NO: 292525 - DNA, 25 bp, probe
tattagctattagttttcccacagc

SEQ ID NO: 292526 - DNA, 25 bp, probe
tataattgatggattcttccatcct

SEQ ID NO: 292527 - DNA, 25 bp, probe
tatttttgcaactatttccacctcc

SEQ ID NO: 292528 - DNA, 25 bp, probe
ttattctctgaataggtcccaaact

SEQ ID NO: 292529 - DNA, 25 bp, probe
tatactctctaaaggaatcccacaa

SEQ ID NO: 292530 - DNA, 25 bp, probe
tataccctaaggcagataggcaaag

SEQ ID NO: 292531 - DNA, 25 bp, probe
tataccctcagccagacagaagtca

SEQ ID NO: 292532 - DNA, 25 bp, probe
tataccctcagccagacagaagtca

SEQ ID NO: 292533 - DNA, 25 bp, probe
tatatcatccgcagccacgaagtca

SEQ ID NO: 292534 - DNA, 25 bp, probe
tatattcctgcataactcaatctga

SEQ ID NO: 292535 - DNA, 25 bp, probe
tatcttcctcaatgagctggtcatg

SEQ ID NO: 292536 - DNA, 25 bp, probe
tatctatatctctaaactgctgtta

SEQ ID NO: 292537 - DNA, 25 bp, probe
tatcttgtctacattcttttaagaa

SEQ ID NO: 292538 - DNA, 25 bp, probe
tatcttgattattttgttgtctaaa

SEQ ID NO: 292539 - DNA, 25 bp, probe
tatttatttcacacattcactagta

SEQ ID NO: 292540 - DNA, 25 bp, probe
tatttatttcacacattcactagta

SEQ ID NO: 292541 - DNA, 25 bp, probe
tttagacattcctcgtcagtattag

SEQ ID NO: 292542 - DNA, 25 bp, probe
tttgaacttctctactcctgtagtt

SEQ ID NO: 292543 - DNA, 25 bp, probe
tttggccttaaaggcgctgtcaccc

SEQ ID NO: 292544 - DNA, 25 bp, probe
ttcgaattctactgactcgacccac

SEQ ID NO: 292545 - DNA, 25 bp, probe
tttaactgtaccatccagagcccac

SEQ ID NO: 292546 - DNA, 25 bp, probe
ttattacgacacgccactatgaccc

SEQ ID NO: 292547 - DNA, 25 bp, probe
ttcatttctggctgttgcctggacc

SEQ ID NO: 292548 - DNA, 25 bp, probe
tttttgcccagtcgttctggaccaa

SEQ ID NO: 292549 - DNA, 25 bp, probe
tttgttcgtgaggcctttggcccga

SEQ ID NO: 292550 - DNA, 25 bp, probe
ttatcgggaaccatttgtgcaacga

SEQ ID NO: 292551 - DNA, 25 bp, probe
ttctgggggtccacttgtctgtaat

SEQ ID NO: 292552 - DNA, 25 bp, probe
ttctggggggatgtccattttggag

SEQ ID NO: 292553 - DNA, 25 bp, probe
ttagttgggaagcctccttttgagg

SEQ ID NO: 292554 - DNA, 25 bp, probe
ttagttgggaagcctccttttgagg

SEQ ID NO: 292555 - DNA, 25 bp, probe
tatagcttgtgtaacttccttttca

SEQ ID NO: 292556 - DNA, 25 bp, probe
tatagtatttacattctcttttagg

SEQ ID NO: 292557 - DNA, 25 bp, probe
tatacttttctcagttctacttatg

SEQ ID NO: 292558 - DNA, 25 bp, probe
tatacttacctgagacctagttcca

SEQ ID NO: 292559 - DNA, 25 bp, probe
tataattactccagactctcctatc

SEQ ID NO: 292560 - DNA, 25 bp, probe
tattgttgccatcaatgaccccttc

SEQ ID NO: 292561 - DNA, 25 bp, probe
tatcatgttgccacctgagggcctg

SEQ ID NO: 292562 - DNA, 25 bp, probe
tatatatgaggaacctgaggtccag

SEQ ID NO: 292563 - DNA, 25 bp, probe
tatattaggacgactcagtatccga

SEQ ID NO: 292564 - DNA, 25 bp, probe
tatattgggaagctcaatgatacaa

SEQ ID NO: 292565 - DNA, 25 bp, probe
tatatctaggcaacaacacttagaa

SEQ ID NO: 292566 - DNA, 25 bp, probe
tatcacgaggcccctagctttgaaa

SEQ ID NO: 292567 - DNA, 25 bp, probe
tatacgaggccccacaggaggagaa

SEQ ID NO: 292568 - DNA, 25 bp, probe
tatagccatgactcccgacataggc

SEQ ID NO: 292569 - DNA, 25 bp, probe
tattgctgcaactggcaaacctgcc

SEQ ID NO: 292570 - DNA, 25 bp, probe
tattctcaaattcgccatagacctt

SEQ ID NO: 292571 - DNA, 25 bp, probe
tattctaaaccctcatgtacatctg

SEQ ID NO: 292572 - DNA, 25 bp, probe
tattcaaagcagatcaccattgcga

SEQ ID NO: 292573 - DNA, 25 bp, probe
tattggagacatatagctcagatgg

SEQ ID NO: 292574 - DNA, 25 bp, probe
tttgtagcctacagcgtcatcggcc

SEQ ID NO: 292575 - DNA, 25 bp, probe
tatattacaaacatgttcactgcag

SEQ ID NO: 292576 - DNA, 25 bp, probe
tatattacaaacatgttcactgcag

SEQ ID NO: 292577 - DNA, 25 bp, probe
ttttcgcaaacgtttcacacggact

SEQ ID NO: 292578 - DNA, 25 bp, probe
ttttccggaagagtccccaggagct

SEQ ID NO: 292579 - DNA, 25 bp, probe
ttcacctgggggttccccagagact

SEQ ID NO: 292580 - DNA, 25 bp, probe
ttactttgtgggttgcaatacaaac

SEQ ID NO: 292581 - DNA, 25 bp, probe
tatttttctgggtctcttaatagaa

SEQ ID NO: 292582 - DNA, 25 bp, probe
tattgccttctggtgtcattaaaag

SEQ ID NO: 292583 - DNA, 25 bp, probe
tattgccttctggtgtcattaaaag

SEQ ID NO: 292584 - DNA, 25 bp, probe
tattgctgtccgcttctagaaagag

SEQ ID NO: 292585 - DNA, 25 bp, probe
tttggtacatgcctgttaatattca

SEQ ID NO: 292586 - DNA, 25 bp, probe
tatttgtccacttgaagccatatta

SEQ ID NO: 292587 - DNA, 25 bp, probe
tattccatccatctggaagcacatt

SEQ ID NO: 292588 - DNA, 25 bp, probe
tattccatccatctggaagcacatt

SEQ ID NO: 292589 - DNA, 25 bp, probe
tattgctacgatcgtgtcgggccat

SEQ ID NO: 292590 - DNA, 25 bp, probe
tattgtacaatacttcagactgttt

SEQ ID NO: 292591 - DNA, 25 bp, probe
tttgtaaactgataacttttttgct

SEQ ID NO: 292592 - DNA, 25 bp, probe
ttcttacaagttatactcttatttg

SEQ ID NO: 292593 - DNA, 25 bp, probe
tatttaaacttacaggcttatttgt

SEQ ID NO: 292594 - DNA, 25 bp, probe
tatttgttacttttagttctataag

SEQ ID NO: 292595 - DNA, 25 bp, probe
tattctttagattttagccttgtaa

SEQ ID NO: 292596 - DNA, 25 bp, probe
tatatcattttatgttcaggcattt

SEQ ID NO: 292597 - DNA, 25 bp, probe
tatttgtttgacatacagaatcata

SEQ ID NO: 292598 - DNA, 25 bp, probe
tttgaggttgagtgacatgttcgaa

SEQ ID NO: 292599 - DNA, 25 bp, probe
tttgcaggttgcacacagttttgtt

SEQ ID NO: 292600 - DNA, 25 bp, probe
ttaggccttcagacgaccttttgta

SEQ ID NO: 292601 - DNA, 25 bp, probe
tttggccttgccagagcttttggaa

SEQ ID NO: 292602 - DNA, 25 bp, probe
tttgggcttctatgacttttatggc

SEQ ID NO: 292603 - DNA, 25 bp, probe
tttggggtcatattgtttcctgtgc

SEQ ID NO: 292604 - DNA, 25 bp, probe
tttcagggaatagtttaagctttat

SEQ ID NO: 292605 - DNA, 25 bp, probe
tattggaggtattgtttaaccttag

SEQ ID NO: 292606 - DNA, 25 bp, probe
tattggaggtattgtttaaccttag

SEQ ID NO: 292607 - DNA, 25 bp, probe
tttggaggtgcttgatctatctaca

SEQ ID NO: 292608 - DNA, 25 bp, probe
tttccagttgcccataagcacatca

SEQ ID NO: 292609 - DNA, 25 bp, probe
tattgacgttcccaaaaccatccag

SEQ ID NO: 292610 - DNA, 25 bp, probe
tattactgggaccaggacccaccag

SEQ ID NO: 292611 - DNA, 25 bp, probe
tttggctgggaggatgccctgcaca

SEQ ID NO: 292612 - DNA, 25 bp, probe
tttggctgggaggatgccctgcaca

SEQ ID NO: 292613 - DNA, 25 bp, probe
tttggctgggaggatgccctgcaca

SEQ ID NO: 292614 - DNA, 25 bp, probe
tttggtctggactgacagcatgtgc

SEQ ID NO: 292615 - DNA, 25 bp, probe
ttgaggccgtatcagacgaggccaa

SEQ ID NO: 292616 - DNA, 25 bp, probe
ttatggccgtggcctacgggcttat

SEQ ID NO: 292617 - DNA, 25 bp, probe
tttggcctggatacagtagaggtgt

SEQ ID NO: 292618 - DNA, 25 bp, probe
tttggccattgcttggggggattat

SEQ ID NO: 292619 - DNA, 25 bp, probe
tttgggtgatcaagggtgtggttag

SEQ ID NO: 292620 - DNA, 25 bp, probe
tataggttgtcaaatggtggcttta

SEQ ID NO: 292621 - DNA, 25 bp, probe
tatttgtggcttaatcgtggccatt

SEQ ID NO: 292622 - DNA, 25 bp, probe
tattagggatttactcagccctgct

SEQ ID NO: 292623 - DNA, 25 bp, probe
tattggggatctgcattccccgctg

SEQ ID NO: 292624 - DNA, 25 bp, probe
tttggtggatgtgttaccccgcaca

SEQ ID NO: 292625 - DNA, 25 bp, probe
tttggtggatgtgttaccccgcaca

SEQ ID NO: 292626 - DNA, 25 bp, probe
tttggggtagatgcggccccgatca

SEQ ID NO: 292627 - DNA, 25 bp, probe
tttggggtagatgcggccccgatca

SEQ ID NO: 292628 - DNA, 25 bp, probe
tttggggaagaggccgccttcaggt

SEQ ID NO: 292629 - DNA, 25 bp, probe
tttgggatggatgagctcccccagg

SEQ ID NO: 292630 - DNA, 25 bp, probe
tattattgtggatactggcccttgg

SEQ ID NO: 292631 - DNA, 25 bp, probe
tattatctctgtctactattccttg

SEQ ID NO: 292632 - DNA, 25 bp, probe
tatcaatcttattttatattctctt

SEQ ID NO: 292633 - DNA, 25 bp, probe
tatcaatctctcaatgtttttactt

SEQ ID NO: 292634 - DNA, 25 bp, probe
tatcaatctctcaatgtttttactt

SEQ ID NO: 292635 - DNA, 25 bp, probe
tataccatctccagctatttacaca

SEQ ID NO: 292636 - DNA, 25 bp, probe
tatatccactccagtgagattatga

SEQ ID NO: 292637 - DNA, 25 bp, probe
tatatctatcttatatagtttacta

SEQ ID NO: 292638 - DNA, 25 bp, probe
tatatccagtaagtagaattatctc

SEQ ID NO: 292639 - DNA, 25 bp, probe
tatattcgcaaaatcggttcattcg

SEQ ID NO: 292640 - DNA, 25 bp, probe
tataccccaaattgtgtatatatct

SEQ ID NO: 292641 - DNA, 25 bp, probe
tataccctgtaatagcatactatta

SEQ ID NO: 292642 - DNA, 25 bp, probe
tatactccttaatactagattgatc

SEQ ID NO: 292643 - DNA, 25 bp, probe
tattttcttaagtgccaatgggccc

SEQ ID NO: 292644 - DNA, 25 bp, probe
tttgttttggactctctgtggtccc

SEQ ID NO: 292645 - DNA, 25 bp, probe
tattgcttttgtgtttctatggtcc

SEQ ID NO: 292646 - DNA, 25 bp, probe
tatttgctttggggttttgtttctg

SEQ ID NO: 292647 - DNA, 25 bp, probe
tattttgtatggctttttggttatg

SEQ ID NO: 292648 - DNA, 25 bp, probe
tattttaggctgctcttttgctgtt

SEQ ID NO: 292649 - DNA, 25 bp, probe
tatatcccagactgtcttttatctt

SEQ ID NO: 292650 - DNA, 25 bp, probe
tatatcccagactgtcttttatctt

SEQ ID NO: 292651 - DNA, 25 bp, probe
tatatatcccagactgtcttttatc

SEQ ID NO: 292652 - DNA, 25 bp, probe
tatcaatcccgttttgacatgttca

SEQ ID NO: 292653 - DNA, 25 bp, probe
tatcaatgccagcttcattaagata

SEQ ID NO: 292654 - DNA, 25 bp, probe
tattgatggcgccccatgtgcaaga

SEQ ID NO: 292655 - DNA, 25 bp, probe
tttgactgctgctacctgaccagca

SEQ ID NO: 292656 - DNA, 25 bp, probe
tatttattgcatacttgcacatcaa

SEQ ID NO: 292657 - DNA, 25 bp, probe
tatttttgacaactgccatgaactc

SEQ ID NO: 292658 - DNA, 25 bp, probe
tattttttcatacggctgcagcagc

SEQ ID NO: 292659 - DNA, 25 bp, probe
tattttgtatcatcgtgcctatagc

SEQ ID NO: 292660 - DNA, 25 bp, probe
tatttagctctcttcgataattcca

SEQ ID NO: 292661 - DNA, 25 bp, probe
tatattcagtctctgtgtaatcatc

SEQ ID NO: 292662 - DNA, 25 bp, probe
tatatacagtctaattgttcatcct

SEQ ID NO: 292663 - DNA, 25 bp, probe
tatatagtttactattttacttcta

SEQ ID NO: 292664 - DNA, 25 bp, probe
tattactttaggactgtgtagttgt

SEQ ID NO: 292665 - DNA, 25 bp, probe
tattcaggttacccttctgtgctag

SEQ ID NO: 292666 - DNA, 25 bp, probe
tatacagtttgactttttggaattc

SEQ ID NO: 292667 - DNA, 25 bp, probe
ttaagttttcctctgtgcaaattta

SEQ ID NO: 292668 - DNA, 25 bp, probe
tattaagttttcctctgtgcaaatt

SEQ ID NO: 292669 - DNA, 25 bp, probe
tataattgttttgacaagcataatt

SEQ ID NO: 292670 - DNA, 25 bp, probe
tatttttgtactgaatctcataatt

SEQ ID NO: 292671 - DNA, 25 bp, probe
tatttttatcctgcaactcttgata

SEQ ID NO: 292672 - DNA, 25 bp, probe
tatttttatcctgcaactcttgata

SEQ ID NO: 292673 - DNA, 25 bp, probe
tatttatgttctattcatcttttga

SEQ ID NO: 292674 - DNA, 25 bp, probe
tatactatgttaatgtctgactgtt

SEQ ID NO: 292675 - DNA, 25 bp, probe
tatactgaggatttcctcagctggg

SEQ ID NO: 292676 - DNA, 25 bp, probe
tattcatagtgtttcccacgtggca

SEQ ID NO: 292677 - DNA, 25 bp, probe
tattagatttactgctaatgaggac

SEQ ID NO: 292678 - DNA, 25 bp, probe
tattcgttatacggaagatgatgaa

SEQ ID NO: 292679 - DNA, 25 bp, probe
tatcaaatgataactggaagctgag

SEQ ID NO: 292680 - DNA, 25 bp, probe
tatcacaaatctgtagtagcatggg

SEQ ID NO: 292681 - DNA, 25 bp, probe
tataccacagctgtggatatctgga

SEQ ID NO: 292682 - DNA, 25 bp, probe
tataccaatctcctgaggcttgtgg

SEQ ID NO: 292683 - DNA, 25 bp, probe
tatacaaatttttggctgctgtgaa

SEQ ID NO: 292684 - DNA, 25 bp, probe
ttgtcaaatttgtggagttaggtgg

SEQ ID NO: 292685 - DNA, 25 bp, probe
tttgcaagttggccgaggcttgagg

SEQ ID NO: 292686 - DNA, 25 bp, probe
tttttgtgggtggggcttgggagat

SEQ ID NO: 292687 - DNA, 25 bp, probe
tatttcttttggtggacttggaatc

SEQ ID NO: 292688 - DNA, 25 bp, probe
tatttcttttggtggacttggaatc

SEQ ID NO: 292689 - DNA, 25 bp, probe
tatttctaaatgttttgactgggca

SEQ ID NO: 292690 - DNA, 25 bp, probe
tatttcagaagatcattaagttgga

SEQ ID NO: 292691 - DNA, 25 bp, probe
tatttagtagtgtatctcatagata

SEQ ID NO: 292692 - DNA, 25 bp, probe
tatattggtggttctcagcaagaga

SEQ ID NO: 292693 - DNA, 25 bp, probe
tatatatgcagactttctaaagaag

SEQ ID NO: 292694 - DNA, 25 bp, probe
tatatatgcagactttctaaagaag

SEQ ID NO: 292695 - DNA, 25 bp, probe
tattctcagagccattaaacactag

SEQ ID NO: 292696 - DNA, 25 bp, probe
tattacaggctctttaatccatctg

SEQ ID NO: 292697 - DNA, 25 bp, probe
tattagcagccctctgagatggcgt

SEQ ID NO: 292698 - DNA, 25 bp, probe
tttgtgctgacctctgatatggcat

SEQ ID NO: 292699 - DNA, 25 bp, probe
tattgtggatcctttcatagactac

SEQ ID NO: 292700 - DNA, 25 bp, probe
tatttgtacactatctggcacatat

SEQ ID NO: 292701 - DNA, 25 bp, probe
tattcagcatcctttatctgtgact

SEQ ID NO: 292702 - DNA, 25 bp, probe
tattagttttggagttctttatgtt

SEQ ID NO: 292703 - DNA, 25 bp, probe
tattagccttgtctttgattttatg

SEQ ID NO: 292704 - DNA, 25 bp, probe
tatttctctgcgtcctaattttttg

SEQ ID NO: 292705 - DNA, 25 bp, probe
tattgcacttcagccaaatgtttat

SEQ ID NO: 292706 - DNA, 25 bp, probe
tttggcctcaacgtgaagcttttct

SEQ ID NO: 292707 - DNA, 25 bp, probe
tattaactgcaacattgaccttctc

SEQ ID NO: 292708 - DNA, 25 bp, probe
tattaagtgctttatgaacatttgt

SEQ ID NO: 292709 - DNA, 25 bp, probe
tattaagtgctttatgaacatttgt

SEQ ID NO: 292710 - DNA, 25 bp, probe
tattaacatttgcaggacactttta

SEQ ID NO: 292711 - DNA, 25 bp, probe
tattcacactttcaaactgtgtatt

SEQ ID NO: 292712 - DNA, 25 bp, probe
tattgccctttacacgtgtgcttgg

SEQ ID NO: 292713 - DNA, 25 bp, probe
tatttcctattatgggtgtgccctg

SEQ ID NO: 292714 - DNA, 25 bp, probe
tatttccattcttgggtttctgcgc

SEQ ID NO: 292715 - DNA, 25 bp, probe
tattttctgtaacgttttcctgaag

SEQ ID NO: 292716 - DNA, 25 bp, probe
tatttttataagcttgttggcctag

SEQ ID NO: 292717 - DNA, 25 bp, probe
tatttttagattcttctgctcccta

SEQ ID NO: 292718 - DNA, 25 bp, probe
tattttacagatctttttgactatc

SEQ ID NO: 292719 - DNA, 25 bp, probe
tttgttccagtttattttaaatgca

SEQ ID NO: 292720 - DNA, 25 bp, probe
tttgagtcctgttaatgtagtagaa

SEQ ID NO: 292721 - DNA, 25 bp, probe
tattggtcctggtgatgcttggtgc

SEQ ID NO: 292722 - DNA, 25 bp, probe
tttgtggcccgaaatcgtagtgctt

SEQ ID NO: 292723 - DNA, 25 bp, probe
tttgttcctaatgacgtggacttta

SEQ ID NO: 292724 - DNA, 25 bp, probe
tattgtaccaaagacagtggtggtc

SEQ ID NO: 292725 - DNA, 25 bp, probe
tatattttcaagatacatgttgtat

SEQ ID NO: 292726 - DNA, 25 bp, probe
tatagcttccaggtattcggtgtca

SEQ ID NO: 292727 - DNA, 25 bp, probe
tatttgtccagcctattgcaggctt

SEQ ID NO: 292728 - DNA, 25 bp, probe
tatttgatgtaggtttgggtttttg

SEQ ID NO: 292729 - DNA, 25 bp, probe
tattctttactttaggtgttgcttt

SEQ ID NO: 292730 - DNA, 25 bp, probe
tattcattatacttctgacctttgg

SEQ ID NO: 292731 - DNA, 25 bp, probe
tatatataatactttgtccttcata

SEQ ID NO: 292732 - DNA, 25 bp, probe
tatatagattccttgctgttcctca

SEQ ID NO: 292733 - DNA, 25 bp, probe
tatagacttctaatgtatttctctt

SEQ ID NO: 292734 - DNA, 25 bp, probe
tataacctgcataactttttgtctt

SEQ ID NO: 292735 - DNA, 25 bp, probe
tataagcctcacattttatgatttt

SEQ ID NO: 292736 - DNA, 25 bp, probe
tatatctctcatgcatattttattt

SEQ ID NO: 292737 - DNA, 25 bp, probe
tatatcaatcctcttttgatgtctg

SEQ ID NO: 292738 - DNA, 25 bp, probe
tattggtggcatcttcattgttctg

SEQ ID NO: 292739 - DNA, 25 bp, probe
tttggcttggctgttcgatttgagc

SEQ ID NO: 292740 - DNA, 25 bp, probe
ttagcgactgcgacgttcgatcttg

SEQ ID NO: 292741 - DNA, 25 bp, probe
tataggaatgaactgtctgtgaaat

SEQ ID NO: 292742 - DNA, 25 bp, probe
ttagcagaagcaaatgtcatgcagc

SEQ ID NO: 292743 - DNA, 25 bp, probe
tatataaagcaccagtctgctcccc

SEQ ID NO: 292744 - DNA, 25 bp, probe
tattcaaggcattgagaatgtacct

SEQ ID NO: 292745 - DNA, 25 bp, probe
tattcagggacactatattacaaat

SEQ ID NO: 292746 - DNA, 25 bp, probe
tatattggcaacctattctcactaa

SEQ ID NO: 292747 - DNA, 25 bp, probe
tatatgggccaggctttgatatctg

SEQ ID NO: 292748 - DNA, 25 bp, probe
tatatgggccaggctttgatatctg

SEQ ID NO: 292749 - DNA, 25 bp, probe
tattgggaagctcaatgatacaaac

SEQ ID NO: 292750 - DNA, 25 bp, probe
tattagcagaagcaaatgtcatgca

SEQ ID NO: 292751 - DNA, 25 bp, probe
tttgaatggcagcatgatcatgtaa

SEQ ID NO: 292752 - DNA, 25 bp, probe
tttggcatgtgctctgagcttgaat

SEQ ID NO: 292753 - DNA, 25 bp, probe
tttggcatcagctactgacacgtaa

SEQ ID NO: 292754 - DNA, 25 bp, probe
tattgtcatgaactatatccgtaac

SEQ ID NO: 292755 - DNA, 25 bp, probe
tatttatgcaagttagggtctatgt

SEQ ID NO: 292756 - DNA, 25 bp, probe
tattccaaagtcatggttctctggt

SEQ ID NO: 292757 - DNA, 25 bp, probe
tttgcccaaagactggtacttcctt

SEQ ID NO: 292758 - DNA, 25 bp, probe
tttgccaaaagaatctctacccctt

SEQ ID NO: 292759 - DNA, 25 bp, probe
tttatcagatcaaaaccaacccggt

SEQ ID NO: 292760 - DNA, 25 bp, probe
tttgacgacgaaaacacagcccagt

SEQ ID NO: 292761 - DNA, 25 bp, probe
ttatgggagtaaacaccttcaaatt

SEQ ID NO: 292762 - DNA, 25 bp, probe
tatagaggtatatttagcctctttt

SEQ ID NO: 292763 - DNA, 25 bp, probe
tatagatcctaaattcacgcacccc

SEQ ID NO: 292764 - DNA, 25 bp, probe
tatatgtcgctaactcacacatcac

SEQ ID NO: 292765 - DNA, 25 bp, probe
tatatgttgttaactcacacatcac

SEQ ID NO: 292766 - DNA, 25 bp, probe
tatatcatggctacacactcacaag

SEQ ID NO: 292767 - DNA, 25 bp, probe
tattacagcatgacaagctcaaata

SEQ ID NO: 292768 - DNA, 25 bp, probe
tattacagcatgacaagctcaaata

SEQ ID NO: 292769 - DNA, 25 bp, probe
tattaccgcatctatgtcacagcta

SEQ ID NO: 292770 - DNA, 25 bp, probe
tattctcgcagcatttccagttaag

SEQ ID NO: 292771 - DNA, 25 bp, probe
tatttctggctttcccagactagaa

SEQ ID NO: 292772 - DNA, 25 bp, probe
tatttctggctttcccagactagaa

SEQ ID NO: 292773 - DNA, 25 bp, probe
tatttcttctactccagtggtgaga

SEQ ID NO: 292774 - DNA, 25 bp, probe
tattatcttatctattgggtggtat

SEQ ID NO: 292775 - DNA, 25 bp, probe
tatttctgtaacttgtatttaatga

SEQ ID NO: 292776 - DNA, 25 bp, probe
tatttcttattcctcttttccaagt

SEQ ID NO: 292777 - DNA, 25 bp, probe
tttgaatattcccaattttcgaagt

SEQ ID NO: 292778 - DNA, 25 bp, probe
tttgactttacctttcctcaaagat

SEQ ID NO: 292779 - DNA, 25 bp, probe
tatttttaactctgtacatcagaag

SEQ ID NO: 292780 - DNA, 25 bp, probe
tttgttgaaatggcatcgtacataa

SEQ ID NO: 292781 - DNA, 25 bp, probe
tatacttcaaatgtcatttcataca

SEQ ID NO: 292782 - DNA, 25 bp, probe
tatactctacactcattcttaactt

SEQ ID NO: 292783 - DNA, 25 bp, probe
tatacatccacagggttttgacact

SEQ ID NO: 292784 - DNA, 25 bp, probe
tttcccacagagcagtattaggctg

SEQ ID NO: 292785 - DNA, 25 bp, probe
tttacccttgaaaagatcaggatgt

SEQ ID NO: 292786 - DNA, 25 bp, probe
tatttctccttggatacagatacgt

SEQ ID NO: 292787 - DNA, 25 bp, probe
tatatttccattgtgaccagcagca

SEQ ID NO: 292788 - DNA, 25 bp, probe
tatattataactctgaagcatgata

SEQ ID NO: 292789 - DNA, 25 bp, probe
tatagttcaaccatgattgatgatg

SEQ ID NO: 292790 - DNA, 25 bp, probe
tatacttaatcccatgtcatgcgac

SEQ ID NO: 292791 - DNA, 25 bp, probe
tattttatggcccagccatcagcat

SEQ ID NO: 292792 - DNA, 25 bp, probe
tatttctggaaccgacagcactccc

SEQ ID NO: 292793 - DNA, 25 bp, probe
tatttttgagacagagcctcgctct

SEQ ID NO: 292794 - DNA, 25 bp, probe
tttggtaagcatatacctggctttc

SEQ ID NO: 292795 - DNA, 25 bp, probe
tttgtgtaccaaaatgcactggctt

SEQ ID NO: 292796 - DNA, 25 bp, probe
tttgcccaccagtaatcctgatggt

SEQ ID NO: 292797 - DNA, 25 bp, probe
tttgcccaccagtaatcctgatggt

SEQ ID NO: 292798 - DNA, 25 bp, probe
tttgcagaaccaggttcttgcgcgt

SEQ ID NO: 292799 - DNA, 25 bp, probe
tttgcgacatgacggtgatgctgag

SEQ ID NO: 292800 - DNA, 25 bp, probe
tttcaagcagatagcaggagatgac

SEQ ID NO: 292801 - DNA, 25 bp, probe
tttgaagatgatggcaggaaggtct

SEQ ID NO: 292802 - DNA, 25 bp, probe
tattatcggtgcaggtaggtcatta

SEQ ID NO: 292803 - DNA, 25 bp, probe
ttcggagagctcagattaggtaaaa

SEQ ID NO: 292804 - DNA, 25 bp, probe
ttgggagactgtcaagaggtgcaca

SEQ ID NO: 292805 - DNA, 25 bp, probe
tttggagccactgaagagccgactg

SEQ ID NO: 292806 - DNA, 25 bp, probe
tttgaagcacctgaataggcaagtc

SEQ ID NO: 292807 - DNA, 25 bp, probe
tttgtacaagtgagataggaattct

SEQ ID NO: 292808 - DNA, 25 bp, probe
tttgtctgaaggggaaaggcattct

SEQ ID NO: 292809 - DNA, 25 bp, probe
tttgcaggtcgggagaaaggtcgct

SEQ ID NO: 292810 - DNA, 25 bp, probe
tttgagttgtggtggacgctggcct

SEQ ID NO: 292811 - DNA, 25 bp, probe
tttgagttgtggtggacgctggcct

SEQ ID NO: 292812 - DNA, 25 bp, probe
tttggaattggaagcaccgctgaaa

SEQ ID NO: 292813 - DNA, 25 bp, probe
tttggaattggaagcaccgctgaaa

SEQ ID NO: 292814 - DNA, 25 bp, probe
tttggagttgtctaccacggagaat

SEQ ID NO: 292815 - DNA, 25 bp, probe
tattggaataactcacagggatatt

SEQ ID NO: 292816 - DNA, 25 bp, probe
tttggaacagtctacaagggaaagt

SEQ ID NO: 292817 - DNA, 25 bp, probe
ttatagaaggtctcaagtggctagc

SEQ ID NO: 292818 - DNA, 25 bp, probe
ttcaaagaggtggacgagtgctctc

SEQ ID NO: 292819 - DNA, 25 bp, probe
tataccaagggcaagcggctgcccc

SEQ ID NO: 292820 - DNA, 25 bp, probe
tatttcaacggccaggactgccagc

SEQ ID NO: 292821 - DNA, 25 bp, probe
tatttcaacggccaggactgccagc

SEQ ID NO: 292822 - DNA, 25 bp, probe
tttcagaaagcgcagacctgccccc

SEQ ID NO: 292823 - DNA, 25 bp, probe
tttcgatgaagcccgagctcgtttc

SEQ ID NO: 292824 - DNA, 25 bp, probe
tttcgatgaagcccgagctcgtttc

SEQ ID NO: 292825 - DNA, 25 bp, probe
tttgggagatggctcgtcgttgtat

SEQ ID NO: 292826 - DNA, 25 bp, probe
tttgggatctggaccggggagtaca

SEQ ID NO: 292827 - DNA, 25 bp, probe
tttgggatgtcccgggacgtgtaca

SEQ ID NO: 292828 - DNA, 25 bp, probe
tttggaatacacatgcaggacgtta

SEQ ID NO: 292829 - DNA, 25 bp, probe
tttggaattcgtgcaggaagccatg

SEQ ID NO: 292830 - DNA, 25 bp, probe
tttggcattgtcgtgggcaccagcc

SEQ ID NO: 292831 - DNA, 25 bp, probe
tatatgtgctatcaggaaacccctt

SEQ ID NO: 292832 - DNA, 25 bp, probe
tatatgtgtattgtatacttttttt

SEQ ID NO: 292833 - DNA, 25 bp, probe
tatagtctattcattaagtaatctt

SEQ ID NO: 292834 - DNA, 25 bp, probe
tatagtctattcattaagtaatctt

SEQ ID NO: 292835 - DNA, 25 bp, probe
ttggtgctattatttgaaggacgaa

SEQ ID NO: 292836 - DNA, 25 bp, probe
tattggaattgcttatgaaggaaaa

SEQ ID NO: 292837 - DNA, 25 bp, probe
tattgcgggcgctctagaggataac

SEQ ID NO: 292838 - DNA, 25 bp, probe
tattctggaccacttactggtgaaa

SEQ ID NO: 292839 - DNA, 25 bp, probe
tttcagggacaattactggggacaa

SEQ ID NO: 292840 - DNA, 25 bp, probe
tttaaggcatcattttcgagggtct

SEQ ID NO: 292841 - DNA, 25 bp, probe
tttaagtgtcccttcgaaggctgcg

SEQ ID NO: 292842 - DNA, 25 bp, probe
tattgaatgggtgaacaacactgct

SEQ ID NO: 292843 - DNA, 25 bp, probe
tttgtgggttgcaatacaaactgct

SEQ ID NO: 292844 - DNA, 25 bp, probe
tttcatggtgttgcaagccaagctg

SEQ ID NO: 292845 - DNA, 25 bp, probe
ttggctggtttccttgtaacagggt

SEQ ID NO: 292846 - DNA, 25 bp, probe
ttgtggggttttcgtacagcaaggc

SEQ ID NO: 292847 - DNA, 25 bp, probe
tttggtttagttctatctgaggccg

SEQ ID NO: 292848 - DNA, 25 bp, probe
tttggctttagcatgacattcgggg

SEQ ID NO: 292849 - DNA, 25 bp, probe
tttggccttagcttgacggcagggc

SEQ ID NO: 292850 - DNA, 25 bp, probe
tttggccttagcttgacggcagggc

SEQ ID NO: 292851 - DNA, 25 bp, probe
tattacaattattcgggccaggtga

SEQ ID NO: 292852 - DNA, 25 bp, probe
tattacagttgacgcggccggcgaa

SEQ ID NO: 292853 - DNA, 25 bp, probe
tatttcattgaacctgtacagtgga

SEQ ID NO: 292854 - DNA, 25 bp, probe
tatattaatacgcctctgacatgag

SEQ ID NO: 292855 - DNA, 25 bp, probe
tatatctaaatcgcatctggaaacc

SEQ ID NO: 292856 - DNA, 25 bp, probe
tatattcagagtaacacaggattca

SEQ ID NO: 292857 - DNA, 25 bp, probe
tatttatgacagaacacacatgcag

SEQ ID NO: 292858 - DNA, 25 bp, probe
tatttcagaaggtcatcagattgtg

SEQ ID NO: 292859 - DNA, 25 bp, probe
tatataccatcatgtacagttgctg

SEQ ID NO: 292860 - DNA, 25 bp, probe
tattcccataaggatcatctctctg

SEQ ID NO: 292861 - DNA, 25 bp, probe
tatttcttagtggtcattgctctgc

SEQ ID NO: 292862 - DNA, 25 bp, probe
tatatttaggaacatatgctcattt

SEQ ID NO: 292863 - DNA, 25 bp, probe
tataggcaatggaaaattctctttg

SEQ ID NO: 292864 - DNA, 25 bp, probe
tatattgccatgtttattttgtttg

SEQ ID NO: 292865 - DNA, 25 bp, probe
tatattgccatgtttattttgtttg

SEQ ID NO: 292866 - DNA, 25 bp, probe
tatattgccatgtttattttgtttg

SEQ ID NO: 292867 - DNA, 25 bp, probe
tatattcagatagccttgtttttta

SEQ ID NO: 292868 - DNA, 25 bp, probe
tatttgagtatggcggtttccctcc

SEQ ID NO: 292869 - DNA, 25 bp, probe
tattcgagctcaacggtttaccctc

SEQ ID NO: 292870 - DNA, 25 bp, probe
tttggagcatgcactgccagttact

SEQ ID NO: 292871 - DNA, 25 bp, probe
tttgggcacatttgcagcagccacc

SEQ ID NO: 292872 - DNA, 25 bp, probe
tttggatggcatttcccatgcacct

SEQ ID NO: 292873 - DNA, 25 bp, probe
tttatgatgcactgattccatccca

SEQ ID NO: 292874 - DNA, 25 bp, probe
tattatcaactgctgcttcaccaga

SEQ ID NO: 292875 - DNA, 25 bp, probe
tatatgtaaatgtgttagcactgat

SEQ ID NO: 292876 - DNA, 25 bp, probe
tttgtggcaagattttcatgacttt

SEQ ID NO: 292877 - DNA, 25 bp, probe
tttgtgtacagagtcctcatccagt

SEQ ID NO: 292878 - DNA, 25 bp, probe
tattatttgatattcttctccagtg

SEQ ID NO: 292879 - DNA, 25 bp, probe
tattttgaatgatgagccttcgtgc

SEQ ID NO: 292880 - DNA, 25 bp, probe
tattcttgcaagtgtccttctacaa

SEQ ID NO: 292881 - DNA, 25 bp, probe
tattcttcacaaagcatccctcaac

SEQ ID NO: 292882 - DNA, 25 bp, probe
tatttgtccacaatgatcaactacg

SEQ ID NO: 292883 - DNA, 25 bp, probe
tttgtccacaatgatcaactacgcc

SEQ ID NO: 292884 - DNA, 25 bp, probe
tatttgtcactaccaaactcagccc

SEQ ID NO: 292885 - DNA, 25 bp, probe
tattttccttctgaagtctgagccc

SEQ ID NO: 292886 - DNA, 25 bp, probe
tattttgtatttggcaactgtgggc

SEQ ID NO: 292887 - DNA, 25 bp, probe
tattttctatttcgcacagggtctc

SEQ ID NO: 292888 - DNA, 25 bp, probe
tatttcacttgtacccagtttcact

SEQ ID NO: 292889 - DNA, 25 bp, probe
tatttgcagtttacgtatgatctta

SEQ ID NO: 292890 - DNA, 25 bp, probe
tttgtcgcagtcacgatcaacttag

SEQ ID NO: 292891 - DNA, 25 bp, probe
tatttcatatgtttcctcaactgta

SEQ ID NO: 292892 - DNA, 25 bp, probe
tatttccatttgtttattcctaaat

SEQ ID NO: 292893 - DNA, 25 bp, probe
tatttccttttttatgcttagaaca

SEQ ID NO: 292894 - DNA, 25 bp, probe
tattctgccctccttaatttgggaa

SEQ ID NO: 292895 - DNA, 25 bp, probe
tattgctgcctctgagtttattgag

SEQ ID NO: 292896 - DNA, 25 bp, probe
tatttctccagcaaatttgaggaag

SEQ ID NO: 292897 - DNA, 25 bp, probe
tattgtttgagcaacttggatgcca

SEQ ID NO: 292898 - DNA, 25 bp, probe
tatttattccacatcattatgccta

SEQ ID NO: 292899 - DNA, 25 bp, probe
tatttagtcaacatgctgctctcca

SEQ ID NO: 292900 - DNA, 25 bp, probe
tattgggtcaagctgcttacctgcc

SEQ ID NO: 292901 - DNA, 25 bp, probe
tattgggtcaagctgcttacctgcc

SEQ ID NO: 292902 - DNA, 25 bp, probe
tttgggctgatgcgagcactacctc

SEQ ID NO: 292903 - DNA, 25 bp, probe
tttctggcagtgcaggcattactaa

SEQ ID NO: 292904 - DNA, 25 bp, probe
tttgaacagttggctgtatgactga

SEQ ID NO: 292905 - DNA, 25 bp, probe
ttagacgagtaagtgtggacgatct

SEQ ID NO: 292906 - DNA, 25 bp, probe
ttagacgagtaagtgtggacgatct

SEQ ID NO: 292907 - DNA, 25 bp, probe
ttgagcctgaggcccttggtaacct

SEQ ID NO: 292908 - DNA, 25 bp, probe
ttagctctaggccactttacgcaac

SEQ ID NO: 292909 - DNA, 25 bp, probe
ttagctcttcgatacttacacaagg

SEQ ID NO: 292910 - DNA, 25 bp, probe
tatagctcagatggaatgctttaca

SEQ ID NO: 292911 - DNA, 25 bp, probe
tatattcagtccttcttggaagact

SEQ ID NO: 292912 - DNA, 25 bp, probe
tatttagctcccattcagaaactgc

SEQ ID NO: 292913 - DNA, 25 bp, probe
tatttagctcccattcagaaactgc

SEQ ID NO: 292914 - DNA, 25 bp, probe
tattttcccgttggagacacatctg

SEQ ID NO: 292915 - DNA, 25 bp, probe
ttttgtctacgatgggattatgcac

SEQ ID NO: 292916 - DNA, 25 bp, probe
tatttgtaacttggggatggtctcc

SEQ ID NO: 292917 - DNA, 25 bp, probe
tttttcttttgctggatggttcctt

SEQ ID NO: 292918 - DNA, 25 bp, probe
tattactttttctggctgtgttttt

SEQ ID NO: 292919 - DNA, 25 bp, probe
ttttctttttccagtctattttctg

SEQ ID NO: 292920 - DNA, 25 bp, probe
tttttttttgccattatttcttcag

SEQ ID NO: 292921 - DNA, 25 bp, probe
tattttctatttccttttttatgct

SEQ ID NO: 292922 - DNA, 25 bp, probe
tattttacagtacatgtttattatg

SEQ ID NO: 292923 - DNA, 25 bp, probe
tattattatagctacctgttaaaga

SEQ ID NO: 292924 - DNA, 25 bp, probe
tattattatacacacatccatccta

SEQ ID NO: 292925 - DNA, 25 bp, probe
tatattgtgaacgagccacctccta

SEQ ID NO: 292926 - DNA, 25 bp, probe
tattgtggacacggccatgcctatc

SEQ ID NO: 292927 - DNA, 25 bp, probe
tatagatgctgacctccatcatttt

SEQ ID NO: 292928 - DNA, 25 bp, probe
tatagttaggcttccatgatgttac

SEQ ID NO: 292929 - DNA, 25 bp, probe
tatagttaggcttccatgatgttac

SEQ ID NO: 292930 - DNA, 25 bp, probe
tatagtaccactgcacatcatgttt

SEQ ID NO: 292931 - DNA, 25 bp, probe
tatatgttaaatgacatcactggat

SEQ ID NO: 292932 - DNA, 25 bp, probe
tatatgttaaatgacatcactggat

SEQ ID NO: 292933 - DNA, 25 bp, probe
ttatgcttagaacaccagggtttaa

SEQ ID NO: 292934 - DNA, 25 bp, probe
tttgtctcttcataccggttttatg

SEQ ID NO: 292935 - DNA, 25 bp, probe
tttgcctcctaatccgagtggctaa

SEQ ID NO: 292936 - DNA, 25 bp, probe
tattgcaacatttaacctgaattta

SEQ ID NO: 292937 - DNA, 25 bp, probe
tattgcaatttaacaccagagtttt

SEQ ID NO: 292938 - DNA, 25 bp, probe
tatttgatattcttctccagtgttc

SEQ ID NO: 292939 - DNA, 25 bp, probe
tattctgtatccttaccttggtcat

SEQ ID NO: 292940 - DNA, 25 bp, probe
tattcttctgacttaggattggcct

SEQ ID NO: 292941 - DNA, 25 bp, probe
tattattccacatatttttccttga

SEQ ID NO: 292942 - DNA, 25 bp, probe
tattttagtctattttagaccttga

SEQ ID NO: 292943 - DNA, 25 bp, probe
tattgttgttcttatttaaccttgt

SEQ ID NO: 292944 - DNA, 25 bp, probe
tattttttctctggtggcattcctt

SEQ ID NO: 292945 - DNA, 25 bp, probe
tattttctacctgtgctttcattgt

SEQ ID NO: 292946 - DNA, 25 bp, probe
tatttttcacctaagtcatctttga

SEQ ID NO: 292947 - DNA, 25 bp, probe
tattttacctattagtacactcata

SEQ ID NO: 292948 - DNA, 25 bp, probe
tattttacctattagtacactcata

SEQ ID NO: 292949 - DNA, 25 bp, probe
tattttacctatcagagacatctat

SEQ ID NO: 292950 - DNA, 25 bp, probe
tattttagtcaatagaccctctcct

SEQ ID NO: 292951 - DNA, 25 bp, probe
tattttcttattgaggccctgtacc

SEQ ID NO: 292952 - DNA, 25 bp, probe
tatatttctttcattgggcgctttc

SEQ ID NO: 292953 - DNA, 25 bp, probe
tatatttctttcattgggcgctttc

SEQ ID NO: 292954 - DNA, 25 bp, probe
tttgtaaatatccttcgggctttgt

SEQ ID NO: 292955 - DNA, 25 bp, probe
ttggtcaattaccgtggcacacttt

SEQ ID NO: 292956 - DNA, 25 bp, probe
tttgtaatttaagtggcatttctat

SEQ ID NO: 292957 - DNA, 25 bp, probe
tattggactttatttcctttattca

SEQ ID NO: 292958 - DNA, 25 bp, probe
tatatgtatcttcaaccaccttcat

SEQ ID NO: 292959 - DNA, 25 bp, probe
tatttttgtagatctccatgctttg

SEQ ID NO: 292960 - DNA, 25 bp, probe
tattttctgtaattcttctcctttg

SEQ ID NO: 292961 - DNA, 25 bp, probe
tattattctttggtccctcaatttt

SEQ ID NO: 292962 - DNA, 25 bp, probe
tattattctttggtccctcaatttt

SEQ ID NO: 292963 - DNA, 25 bp, probe
tattctctgaataggtcccaaactt

SEQ ID NO: 292964 - DNA, 25 bp, probe
tttgttaatataccccaaattgtgt

SEQ ID NO: 292965 - DNA, 25 bp, probe
tattgcttcaaacacccaaattgtc

SEQ ID NO: 292966 - DNA, 25 bp, probe
tattgttcgcgtcatgccagcaaat

SEQ ID NO: 292967 - DNA, 25 bp, probe
tattcttcgagggcattcagtacat

SEQ ID NO: 292968 - DNA, 25 bp, probe
tattcttcgagggcattcagtacat

SEQ ID NO: 292969 - DNA, 25 bp, probe
tattttctgagacttggattaattc

SEQ ID NO: 292970 - DNA, 25 bp, probe
tatatctcacaggagttggttagaa

SEQ ID NO: 292971 - DNA, 25 bp, probe
tatatgttccgaattgatgactcag

SEQ ID NO: 292972 - DNA, 25 bp, probe
tatatgattcacatgctaaagccag

SEQ ID NO: 292973 - DNA, 25 bp, probe
tttgatcacagctccaggaccagtg

SEQ ID NO: 292974 - DNA, 25 bp, probe
tttgaagcatgggccagacccggca

SEQ ID NO: 292975 - DNA, 25 bp, probe
ttcatgaagggcgcgacccgcgaat

SEQ ID NO: 292976 - DNA, 25 bp, probe
ttctaaccccaggtacccatgaatg

SEQ ID NO: 292977 - DNA, 25 bp, probe
ttctaaccccaggtacccatgaatg

SEQ ID NO: 292978 - DNA, 25 bp, probe
tttggcccgcaactgtggccgagaa

SEQ ID NO: 292979 - DNA, 25 bp, probe
tttggccaaaaagtacagagacaac

SEQ ID NO: 292980 - DNA, 25 bp, probe
tttcctgcaaccagtaaggacaact

SEQ ID NO: 292981 - DNA, 25 bp, probe
ttttctccacttctagggtgctagc

SEQ ID NO: 292982 - DNA, 25 bp, probe
tatttgtcccattcttggagtagtt

SEQ ID NO: 292983 - DNA, 25 bp, probe
tattttcccatcttggaagtaaaat

SEQ ID NO: 292984 - DNA, 25 bp, probe
tattctttctatttgtcaggtgcac

SEQ ID NO: 292985 - DNA, 25 bp, probe
tattctttctatttgtcaggtgcac

SEQ ID NO: 292986 - DNA, 25 bp, probe
tattgatcctttttaaggcagcagt

SEQ ID NO: 292987 - DNA, 25 bp, probe
tatttccattgtgaccagcagcagg

SEQ ID NO: 292988 - DNA, 25 bp, probe
tattatctcattttacacaaaggga

SEQ ID NO: 292989 - DNA, 25 bp, probe
tattttctaccattccaataggaga

SEQ ID NO: 292990 - DNA, 25 bp, probe
tatttgtccaactattcaaaggcta

SEQ ID NO: 292991 - DNA, 25 bp, probe
tatattttgttctattgctagggta

SEQ ID NO: 292992 - DNA, 25 bp, probe
tatattcatcttccactgtgctatg

SEQ ID NO: 292993 - DNA, 25 bp, probe
tatatatcaccttgactgtcctgca

SEQ ID NO: 292994 - DNA, 25 bp, probe
tatatatcaccttgactgtcctgca

SEQ ID NO: 292995 - DNA, 25 bp, probe
tatatgcacagcggatgcacgcctt

SEQ ID NO: 292996 - DNA, 25 bp, probe
tttgtcatgctggctgagcgccagc

SEQ ID NO: 292997 - DNA, 25 bp, probe
tattggtgtgcccacagtcactatc

SEQ ID NO: 292998 - DNA, 25 bp, probe
tttggtggcctgacatgataccctg

SEQ ID NO: 292999 - DNA, 25 bp, probe
tttgggaccatgactgagaagcagc

SEQ ID NO: 293000 - DNA, 25 bp, probe
tattgtcccacacgtgaaaccagca

SEQ ID NO: 293001 - DNA, 25 bp, probe
tatttccaacacttgatcataagcc

SEQ ID NO: 293002 - DNA, 25 bp, probe
tattaccaacctttaaagactgata

SEQ ID NO: 293003 - DNA, 25 bp, probe
tattcccaattttcgaagtcagtaa

SEQ ID NO: 293004 - DNA, 25 bp, probe
tattcccaattttcgaagtcagtaa

SEQ ID NO: 293005 - DNA, 25 bp, probe
tattccttatttcaaattagtatga

SEQ ID NO: 293006 - DNA, 25 bp, probe
tattacttacatttaaatttcttat

SEQ ID NO: 293007 - DNA, 25 bp, probe
tattactagtgtttaagtcattttt

SEQ ID NO: 293008 - DNA, 25 bp, probe
tatttcctttattcaaatcattttt

SEQ ID NO: 293009 - DNA, 25 bp, probe
tatttttattacttaagactttatg

SEQ ID NO: 293010 - DNA, 25 bp, probe
tttgtttctctaaaaagacttgtag

SEQ ID NO: 293011 - DNA, 25 bp, probe
tatttttttcagaacaagtgatgtt

SEQ ID NO: 293012 - DNA, 25 bp, probe
tattcttgtttataacagtgcctta

SEQ ID NO: 293013 - DNA, 25 bp, probe
tattcacgtttataaaatccttaat

SEQ ID NO: 293014 - DNA, 25 bp, probe
tattcactgtcttatctgcagaaat

SEQ ID NO: 293015 - DNA, 25 bp, probe
tattgcacattcatccccaaatgct

SEQ ID NO: 293016 - DNA, 25 bp, probe
tattccataactccagacatcactg

SEQ ID NO: 293017 - DNA, 25 bp, probe
tattccataactccagacatcactg

SEQ ID NO: 293018 - DNA, 25 bp, probe
tattccaagcttccatagctgctgc

SEQ ID NO: 293019 - DNA, 25 bp, probe
tattctcagatctgccaggtctcag

SEQ ID NO: 293020 - DNA, 25 bp, probe
tattctcagatctgccaggtctcag

SEQ ID NO: 293021 - DNA, 25 bp, probe
tattcatcaggctgtactttcaggt

SEQ ID NO: 293022 - DNA, 25 bp, probe
tattcatcaggctgtactttcaggt

SEQ ID NO: 293023 - DNA, 25 bp, probe
tatttcagtgtttccttccagacat

SEQ ID NO: 293024 - DNA, 25 bp, probe
tttgtagcctacagcgtcatcggcc

SEQ ID NO: 293025 - DNA, 25 bp, probe
tttggctcctaacagttgccagccc

SEQ ID NO: 293026 - DNA, 25 bp, probe
tttggctcctaacagttgccagccc

SEQ ID NO: 293027 - DNA, 25 bp, probe
tttggcacctttgggactgccacac

SEQ ID NO: 293028 - DNA, 25 bp, probe
tttggcacctttgggactgccacac

SEQ ID NO: 293029 - DNA, 25 bp, probe
ttaggcccctgggacaatgacccag

SEQ ID NO: 293030 - DNA, 25 bp, probe
tttgaatcctggcgaagcgactccg

SEQ ID NO: 293031 - DNA, 25 bp, probe
tattgatacttggggagggtgcttg

SEQ ID NO: 293032 - DNA, 25 bp, probe
tatttcactcaggggcactgtggtt

SEQ ID NO: 293033 - DNA, 25 bp, probe
tattgtactcagtgttttgaattat

SEQ ID NO: 293034 - DNA, 25 bp, probe
tttggcatgtcctgttttgatagta

SEQ ID NO: 293035 - DNA, 25 bp, probe
tttggcccaaccttttcataggaga

SEQ ID NO: 293036 - DNA, 25 bp, probe
ttatgtgccacatccttgtttaaag

SEQ ID NO: 293037 - DNA, 25 bp, probe
tatttcacacatcccttcttttgaa

SEQ ID NO: 293038 - DNA, 25 bp, probe
tatatttcatcttaattcttttgat

SEQ ID NO: 293039 - DNA, 25 bp, probe
tattattcagctcgagtacttgtct

SEQ ID NO: 293040 - DNA, 25 bp, probe
tattataccagatgaacatttcaaa

SEQ ID NO: 293041 - DNA, 25 bp, probe
tattcaaccacagagccttatgcta

SEQ ID NO: 293042 - DNA, 25 bp, probe
tattccacgcatgaactctgtgagc

SEQ ID NO: 293043 - DNA, 25 bp, probe
tatattcactctgcaaatgtactgc

SEQ ID NO: 293044 - DNA, 25 bp, probe
tttgtccttcactatactactgaaa

SEQ ID NO: 293045 - DNA, 25 bp, probe
tattgtactgccattcctactgtat

SEQ ID NO: 293046 - DNA, 25 bp, probe
tattaccagtttggcctgcactgct

SEQ ID NO: 293047 - DNA, 25 bp, probe
tattcatccagtttcagttgtcctg

SEQ ID NO: 293048 - DNA, 25 bp, probe
tattatccagctttgttgctgctct

SEQ ID NO: 293049 - DNA, 25 bp, probe
tattatccagctttgttgctgctct

SEQ ID NO: 293050 - DNA, 25 bp, probe
tattcagtacatttgtctggctcac

SEQ ID NO: 293051 - DNA, 25 bp, probe
tattcagtacatttgtctggctcac

SEQ ID NO: 293052 - DNA, 25 bp, probe
tattatgtgacatcgcttgttccta

SEQ ID NO: 293053 - DNA, 25 bp, probe
tatttgctgtgatggcctgttgctg

SEQ ID NO: 293054 - DNA, 25 bp, probe
tttgtcatggatggagggtatctgg

SEQ ID NO: 293055 - DNA, 25 bp, probe
tttgagcttgtggaggtggtcggca

SEQ ID NO: 293056 - DNA, 25 bp, probe
tttggcagtgacgtggtggcccagt

SEQ ID NO: 293057 - DNA, 25 bp, probe
tttgggcttcatggtctgggccagt

SEQ ID NO: 293058 - DNA, 25 bp, probe
ttttggcttctctaattggcggtcc

SEQ ID NO: 293059 - DNA, 25 bp, probe
ttttgtatttgtttgtacggaccat

SEQ ID NO: 293060 - DNA, 25 bp, probe
tttgtttatgtttggtacgtcagat

SEQ ID NO: 293061 - DNA, 25 bp, probe
tttgtcaccatgatcaactacccca

SEQ ID NO: 293062 - DNA, 25 bp, probe
tttgtcaccatgatcaactacccca

SEQ ID NO: 293063 - DNA, 25 bp, probe
tttgtggccatggtagtggaccgcc

SEQ ID NO: 293064 - DNA, 25 bp, probe
ttagggaaggatatggaagccactt

SEQ ID NO: 293065 - DNA, 25 bp, probe
ttagggaaggatatggaagccactt

SEQ ID NO: 293066 - DNA, 25 bp, probe
ttagggtgggctctaaatccattat

SEQ ID NO: 293067 - DNA, 25 bp, probe
ttagggtgggctctaaatccattat

SEQ ID NO: 293068 - DNA, 25 bp, probe
tttggagtggttctgtatgaacttt

SEQ ID NO: 293069 - DNA, 25 bp, probe
tttggagggatccattttgatcctt

SEQ ID NO: 293070 - DNA, 25 bp, probe
ttccaggagcgatcgtttgcaacct

SEQ ID NO: 293071 - DNA, 25 bp, probe
tattcaaggtgatcgtattcttcca

SEQ ID NO: 293072 - DNA, 25 bp, probe
tattcgaaggcatcaaacaccccaa

SEQ ID NO: 293073 - DNA, 25 bp, probe
tatttgaaggcatcaagcaccccaa

SEQ ID NO: 293074 - DNA, 25 bp, probe
tatttgaagccatcaacatcacaaa

SEQ ID NO: 293075 - DNA, 25 bp, probe
tatttaagctgttcattctggcaat

SEQ ID NO: 293076 - DNA, 25 bp, probe
tattgtcctggtccaattgccaatt

SEQ ID NO: 293077 - DNA, 25 bp, probe
tattgtctttggcattaacagtgtt

SEQ ID NO: 293078 - DNA, 25 bp, probe
tatttcctgtgccaggtatacgcgt

SEQ ID NO: 293079 - DNA, 25 bp, probe
tattttctgcctaagtgctacgtga

SEQ ID NO: 293080 - DNA, 25 bp, probe
tattttgtgcctagagctctcactc

SEQ ID NO: 293081 - DNA, 25 bp, probe
tttgttgtggcgagcctcatgttac

SEQ ID NO: 293082 - DNA, 25 bp, probe
tttgtgctggggtatcctgtgtttc

SEQ ID NO: 293083 - DNA, 25 bp, probe
tattgtggggactctgcttgtcatc

SEQ ID NO: 293084 - DNA, 25 bp, probe
tttgggaaatcaccagcttggcaga

SEQ ID NO: 293085 - DNA, 25 bp, probe
tttggccagggaggcgcagggacat

SEQ ID NO: 293086 - DNA, 25 bp, probe
tttgtaagcaaagtccaggtccatt

SEQ ID NO: 293087 - DNA, 25 bp, probe
ttgggaactaactcggtcattgctg

SEQ ID NO: 293088 - DNA, 25 bp, probe
tttgaaaccgtctcatggtcttggt

SEQ ID NO: 293089 - DNA, 25 bp, probe
tttgaaggccgagtacgagtttgac

SEQ ID NO: 293090 - DNA, 25 bp, probe
ttgaaaccccaaacagtgactgtac

SEQ ID NO: 293091 - DNA, 25 bp, probe
ttacaaacccacagaggccttcatc

SEQ ID NO: 293092 - DNA, 25 bp, probe
ttacaaacccacaaggagtcccttg

SEQ ID NO: 293093 - DNA, 25 bp, probe
ttacaacttaactaggaaacccatg

SEQ ID NO: 293094 - DNA, 25 bp, probe
ttgtgaagtaaaagagggacccctg

SEQ ID NO: 293095 - DNA, 25 bp, probe
tttgaaaacataacgacccaggcca

SEQ ID NO: 293096 - DNA, 25 bp, probe
tattgaaagactatcgctccacggt

SEQ ID NO: 293097 - DNA, 25 bp, probe
tttgcagacatagcccaggccacag

SEQ ID NO: 293098 - DNA, 25 bp, probe
tttgagacggaacaggctctgcgca

SEQ ID NO: 293099 - DNA, 25 bp, probe
ttgagagtcggagtgccagtcgtcg

SEQ ID NO: 293100 - DNA, 25 bp, probe
tttgagtcggagtcttgctctgtcg

SEQ ID NO: 293101 - DNA, 25 bp, probe
tattcagctcgagtacttgtctgtg

SEQ ID NO: 293102 - DNA, 25 bp, probe
tattcagctcgagtacttgtctgtg

SEQ ID NO: 293103 - DNA, 25 bp, probe
tattcacactgagacatgtgcctta

SEQ ID NO: 293104 - DNA, 25 bp, probe
tatttgcttggcaacacgacttgaa

SEQ ID NO: 293105 - DNA, 25 bp, probe
tatttgcttggcaacacgacttgaa

SEQ ID NO: 293106 - DNA, 25 bp, probe
ttttttgccaactgacttaacaaca

SEQ ID NO: 293107 - DNA, 25 bp, probe
tattattctctaactacacttaaaa

SEQ ID NO: 293108 - DNA, 25 bp, probe
tattttcttatagtatagttacaaa

SEQ ID NO: 293109 - DNA, 25 bp, probe
tatttatttcatagaaagtctcctg

SEQ ID NO: 293110 - DNA, 25 bp, probe
tatttattttggcaagtctttcgtc

SEQ ID NO: 293111 - DNA, 25 bp, probe
tattctattttgcgtttcttacctg

SEQ ID NO: 293112 - DNA, 25 bp, probe
ttgctcgattgtttggtttttaaat

SEQ ID NO: 293113 - DNA, 25 bp, probe
tatttgtggtgaatgtgttttttaa

SEQ ID NO: 293114 - DNA, 25 bp, probe
tattagtgaatcatgcttatttttt

SEQ ID NO: 293115 - DNA, 25 bp, probe
tttgagtagtttctgattatgttga

SEQ ID NO: 293116 - DNA, 25 bp, probe
tttcagtaagttagtgcttctggga

SEQ ID NO: 293117 - DNA, 25 bp, probe
tttcaataaacaagatcgtcaggac

SEQ ID NO: 293118 - DNA, 25 bp, probe
ttccctagggctagacctaagacca

SEQ ID NO: 293119 - DNA, 25 bp, probe
tttactcagggaagcctccaaactt

SEQ ID NO: 293120 - DNA, 25 bp, probe
tttatgccaggcctagatacgacaa

SEQ ID NO: 293121 - DNA, 25 bp, probe
tttatgccaggcctagatacgacaa

SEQ ID NO: 293122 - DNA, 25 bp, probe
tttatgccgggaaaatctgatttgt

SEQ ID NO: 293123 - DNA, 25 bp, probe
tttatgccgggaaaatctgatttgt

SEQ ID NO: 293124 - DNA, 25 bp, probe
tttgtacagagttgaagttgttttt

SEQ ID NO: 293125 - DNA, 25 bp, probe
tttggcacgatgaattatttttgtt

SEQ ID NO: 293126 - DNA, 25 bp, probe
tttggatcctggatttgttgttgtt

SEQ ID NO: 293127 - DNA, 25 bp, probe
tttggacagtagatttatcagtctg

SEQ ID NO: 293128 - DNA, 25 bp, probe
tattatacagtacctttctcagaca

SEQ ID NO: 293129 - DNA, 25 bp, probe
tattatacagtacctttctcagaca

SEQ ID NO: 293130 - DNA, 25 bp, probe
tatttatttatgactgttcagcaaa

SEQ ID NO: 293131 - DNA, 25 bp, probe
tatttatttatttttgagacacagt

SEQ ID NO: 293132 - DNA, 25 bp, probe
tatttatttgtccacttgaagccat

SEQ ID NO: 293133 - DNA, 25 bp, probe
tttgtatttggcaactgtgggcaat

SEQ ID NO: 293134 - DNA, 25 bp, probe
tttgtgaaattcaacctgtgtctta

SEQ ID NO: 293135 - DNA, 25 bp, probe
tttgtttttaacatatgtcatttaa

SEQ ID NO: 293136 - DNA, 25 bp, probe
tttggttctttgccctaatgtttca

SEQ ID NO: 293137 - DNA, 25 bp, probe
tttggctacttgaactctacattta

SEQ ID NO: 293138 - DNA, 25 bp, probe
tttggctacttgaactctacattta

SEQ ID NO: 293139 - DNA, 25 bp, probe
tttggtcatccagattctactaata

SEQ ID NO: 293140 - DNA, 25 bp, probe
tttgggcatcaaatattcgtttaca

SEQ ID NO: 293141 - DNA, 25 bp, probe
tttgagtcagtagatctggtttcca

SEQ ID NO: 293142 - DNA, 25 bp, probe
tttggtttcatggccggttttatca

SEQ ID NO: 293143 - DNA, 25 bp, probe
tttggttttgcccggatcattggag

SEQ ID NO: 293144 - DNA, 25 bp, probe
tttgggtttggccagggaggcgcag

SEQ ID NO: 293145 - DNA, 25 bp, probe
tttgggaacgctggggtgacgctga

SEQ ID NO: 293146 - DNA, 25 bp, probe
tttgggaacgctggggtgacgctga

SEQ ID NO: 293147 - DNA, 25 bp, probe
tttggtcaagcacagggtgaatgtg

SEQ ID NO: 293148 - DNA, 25 bp, probe
tttgatgatcaaggacgggagtatg

SEQ ID NO: 293149 - DNA, 25 bp, probe
tttgatgatcaaggacgggagtatg

SEQ ID NO: 293150 - DNA, 25 bp, probe
tttgatatcaaagtcagtaagccaa

SEQ ID NO: 293151 - DNA, 25 bp, probe
tttgtaaaacagcctatagatgatg

SEQ ID NO: 293152 - DNA, 25 bp, probe
tattgttatacacagctttatgata

SEQ ID NO: 293153 - DNA, 25 bp, probe
tatttctcaaaatcattctatgctg

SEQ ID NO: 293154 - DNA, 25 bp, probe
tatttgctcaataactctactcatt

SEQ ID NO: 293155 - DNA, 25 bp, probe
tatttccagttacttgcctgcattc

SEQ ID NO: 293156 - DNA, 25 bp, probe
tatttccagttacttgcctgcattc

SEQ ID NO: 293157 - DNA, 25 bp, probe
tattctgcggtgaagttgaggctta

SEQ ID NO: 293158 - DNA, 25 bp, probe
tattctgcggtgaagttgaggctta

SEQ ID NO: 293159 - DNA, 25 bp, probe
tattctgggagaacataaggccaat

SEQ ID NO: 293160 - DNA, 25 bp, probe
tattctggtgtctaataaacacaga

SEQ ID NO: 293161 - DNA, 25 bp, probe
tattctgcaggttcatctcagaccc

SEQ ID NO: 293162 - DNA, 25 bp, probe
tattatgcagcttacctaactctca

SEQ ID NO: 293163 - DNA, 25 bp, probe
tattatgctattattcagaatgcca

SEQ ID NO: 293164 - DNA, 25 bp, probe
tattcatgtatgctaatccatctgc

SEQ ID NO: 293165 - DNA, 25 bp, probe
tattcatgtatgctaatccatctgc

SEQ ID NO: 293166 - DNA, 25 bp, probe
tattatgtgatgatggagctatgcc

SEQ ID NO: 293167 - DNA, 25 bp, probe
tattttggttagctatgcaaagtca

SEQ ID NO: 293168 - DNA, 25 bp, probe
tattttctgttgaagtttacaatca

SEQ ID NO: 293169 - DNA, 25 bp, probe
tttttttctaagctgtgactaactc

SEQ ID NO: 293170 - DNA, 25 bp, probe
tttttctgtccttcagggactgaag

SEQ ID NO: 293171 - DNA, 25 bp, probe
tattctttactcccagaagactgta

SEQ ID NO: 293172 - DNA, 25 bp, probe
tttgtttgatcccacagcaatccat

SEQ ID NO: 293173 - DNA, 25 bp, probe
tattgacttcatcggccaagtccat

SEQ ID NO: 293174 - DNA, 25 bp, probe
ttatgactatcaagggagcagttta

SEQ ID NO: 293175 - DNA, 25 bp, probe
ttatcaatgccaagtgtgcacatgt

SEQ ID NO: 293176 - DNA, 25 bp, probe
tattcaatgatcaaggagcaatgtc

SEQ ID NO: 293177 - DNA, 25 bp, probe
tattcaatgatcaaggagcaatgtc

SEQ ID NO: 293178 - DNA, 25 bp, probe
tattgcataatcaatgctggctgat

SEQ ID NO: 293179 - DNA, 25 bp, probe
tattccacatcattatgcctataat

SEQ ID NO: 293180 - DNA, 25 bp, probe
tattgccatgcattatcacaccact

SEQ ID NO: 293181 - DNA, 25 bp, probe
tattgccatgcattatcacaccact

SEQ ID NO: 293182 - DNA, 25 bp, probe
tttgcagcagagcatccgctgcctg

SEQ ID NO: 293183 - DNA, 25 bp, probe
tttgacaatgaatctgctgcctgaa

SEQ ID NO: 293184 - DNA, 25 bp, probe
tattgaaagtcagccctcgacacaa

SEQ ID NO: 293185 - DNA, 25 bp, probe
tattactctgtcgcttccgacatca

SEQ ID NO: 293186 - DNA, 25 bp, probe
tttttttcccttatgagatccacct

SEQ ID NO: 293187 - DNA, 25 bp, probe
tttttttcccttatgagatccacct

SEQ ID NO: 293188 - DNA, 25 bp, probe
tattaatctatcccttttgtgcatg

SEQ ID NO: 293189 - DNA, 25 bp, probe
ttcgaagctcaggccatagtttcag

SEQ ID NO: 293190 - DNA, 25 bp, probe
tttggagctatgggatcgtcatgtg

SEQ ID NO: 293191 - DNA, 25 bp, probe
tttggatttgctcggcttttgactg

SEQ ID NO: 293192 - DNA, 25 bp, probe
tttgtcatcatggcggtgtttttca

SEQ ID NO: 293193 - DNA, 25 bp, probe
tattgcttacctggctttttatatt

SEQ ID NO: 293194 - DNA, 25 bp, probe
tattctttccaggctctttgtatga

SEQ ID NO: 293195 - DNA, 25 bp, probe
tattcttttcagtcttttgtgtttg

SEQ ID NO: 293196 - DNA, 25 bp, probe
tattttactggctttattgtttgct

SEQ ID NO: 293197 - DNA, 25 bp, probe
tttctaagaggcttattttgttctt

SEQ ID NO: 293198 - DNA, 25 bp, probe
tatttattaggggattctatttcat

SEQ ID NO: 293199 - DNA, 25 bp, probe
tattgtttaggagtataattttatt

SEQ ID NO: 293200 - DNA, 25 bp, probe
tttggttagggctgaatgttttcct

SEQ ID NO: 293201 - DNA, 25 bp, probe
ttaggttgaaggcaaaaccaactct

SEQ ID NO: 293202 - DNA, 25 bp, probe
tttggtggacaagaaatacccctgg

SEQ ID NO: 293203 - DNA, 25 bp, probe
tttggggacacccaaaacactgctt

SEQ ID NO: 293204 - DNA, 25 bp, probe
tttggggactctcggatgtacagca

SEQ ID NO: 293205 - DNA, 25 bp, probe
tttgggagcccgacgtgaatgcaga

SEQ ID NO: 293206 - DNA, 25 bp, probe
ttatggaagccaaccggaacaccgt

SEQ ID NO: 293207 - DNA, 25 bp, probe
tttggaagtcatgttggcccacttg

SEQ ID NO: 293208 - DNA, 25 bp, probe
tttggaagatctggtgtagctcctt

SEQ ID NO: 293209 - DNA, 25 bp, probe
tttggaaacagccttcatcccattg

SEQ ID NO: 293210 - DNA, 25 bp, probe
tttggggacaacaatcatgcctcag

SEQ ID NO: 293211 - DNA, 25 bp, probe
tttgggaacttcatcagcctggaga

SEQ ID NO: 293212 - DNA, 25 bp, probe
tttgggtaggtgacctgcttggatc

SEQ ID NO: 293213 - DNA, 25 bp, probe
tttgggtagttctcactgtggatgc

SEQ ID NO: 293214 - DNA, 25 bp, probe
tttgggccagttttacagtgtacat

SEQ ID NO: 293215 - DNA, 25 bp, probe
tttgcaggacacttttacaggcccc

SEQ ID NO: 293216 - DNA, 25 bp, probe
tttgggacccagatcatcgggggcc

SEQ ID NO: 293217 - DNA, 25 bp, probe
tttcggacccagatcatccggagct

SEQ ID NO: 293218 - DNA, 25 bp, probe
tttggaaccctgatcatcaccagac

SEQ ID NO: 293219 - DNA, 25 bp, probe
tttggaaccctgatcatcaccagac

SEQ ID NO: 293220 - DNA, 25 bp, probe
tattggcaacctattctcactaaga

SEQ ID NO: 293221 - DNA, 25 bp, probe
tattggcagaacatagcccactagg

SEQ ID NO: 293222 - DNA, 25 bp, probe
tattggacaagttatgcctaatagc

SEQ ID NO: 293223 - DNA, 25 bp, probe
tttggcaactgtgggcaataatatg

SEQ ID NO: 293224 - DNA, 25 bp, probe
tttggtatcgtggaaggactcatga

SEQ ID NO: 293225 - DNA, 25 bp, probe
tttggttagctatgcaaagtcatga

SEQ ID NO: 293226 - DNA, 25 bp, probe
tttggcttcatgtttgaaagctcgc

SEQ ID NO: 293227 - DNA, 25 bp, probe
tttgctgttagttggatgccactac

SEQ ID NO: 293228 - DNA, 25 bp, probe
tttctgtccagaagggctactttcc

SEQ ID NO: 293229 - DNA, 25 bp, probe
tattttccgaaggcgataatgttct

SEQ ID NO: 293230 - DNA, 25 bp, probe
tattttccaacagcttttcgtcttc

SEQ ID NO: 293231 - DNA, 25 bp, probe
tattttccaaaagtggcctctttgt

SEQ ID NO: 293232 - DNA, 25 bp, probe
tattttccaaaagtggcctctttgt

SEQ ID NO: 293233 - DNA, 25 bp, probe
tttgttctcatggaattggcctatt

SEQ ID NO: 293234 - DNA, 25 bp, probe
tattttgttggcattggtcatttta

SEQ ID NO: 293235 - DNA, 25 bp, probe
tattcttttggttgtcagtttcatt

SEQ ID NO: 293236 - DNA, 25 bp, probe
tattctggcttggggcagcagtccc

SEQ ID NO: 293237 - DNA, 25 bp, probe
tattgggttcttgcagcatctccca

SEQ ID NO: 293238 - DNA, 25 bp, probe
tttggttacttggactatgcccagt

SEQ ID NO: 293239 - DNA, 25 bp, probe
tttggtcttcttccaatgatgctta

SEQ ID NO: 293240 - DNA, 25 bp, probe
tttgtggttctaatcataatggtac

SEQ ID NO: 293241 - DNA, 25 bp, probe
tttgtggttctaatcataatggtac

SEQ ID NO: 293242 - DNA, 25 bp, probe
tttgaggccccaactcaagtgtcac

SEQ ID NO: 293243 - DNA, 25 bp, probe
ttgtgaaccccaaattcgagcacct

SEQ ID NO: 293244 - DNA, 25 bp, probe
tttgaaccaaaaatccgatcacctc

SEQ ID NO: 293245 - DNA, 25 bp, probe
tttggacaagacatttctgaaacct

SEQ ID NO: 293246 - DNA, 25 bp, probe
tttggcaaggtcatgttggcagaac

SEQ ID NO: 293247 - DNA, 25 bp, probe
tttggcgaggtctgcagtggccacc

SEQ ID NO: 293248 - DNA, 25 bp, probe
tttgtctgggtgcggaggagctccc

SEQ ID NO: 293249 - DNA, 25 bp, probe
tattgtcgtgggggaggaatcagcc

SEQ ID NO: 293250 - DNA, 25 bp, probe
tttgtcggggctgagcagctcacca

SEQ ID NO: 293251 - DNA, 25 bp, probe
tttggtcgggcagccgcacactatg

SEQ ID NO: 293252 - DNA, 25 bp, probe
tttgtgggtggagggccagagtgtg

SEQ ID NO: 293253 - DNA, 25 bp, probe
tttgtaggtgggaatccagcctctg

SEQ ID NO: 293254 - DNA, 25 bp, probe
tttgggagtgtttatcgagccaaat

SEQ ID NO: 293255 - DNA, 25 bp, probe
tttggtatggtttgttaggcagcca

SEQ ID NO: 293256 - DNA, 25 bp, probe
tttgtatttgtttgtacggaccata

SEQ ID NO: 293257 - DNA, 25 bp, probe
tttgtattttggttagctatgcaaa

SEQ ID NO: 293258 - DNA, 25 bp, probe
tttgtgattgggcatttgcctactt

SEQ ID NO: 293259 - DNA, 25 bp, probe
tttgagatgggggtcttgctctgtt

SEQ ID NO: 293260 - DNA, 25 bp, probe
tttggagcgagggtttcctgctttt

SEQ ID NO: 293261 - DNA, 25 bp, probe
tttgacctaggcatgtctctgtctt

SEQ ID NO: 293262 - DNA, 25 bp, probe
tttgagcctgaggcccttggtaacc

SEQ ID NO: 293263 - DNA, 25 bp, probe
tttggcgtggtcctttgggaaatca

SEQ ID NO: 293264 - DNA, 25 bp, probe
tttggggtgcttctctgggagatct

SEQ ID NO: 293265 - DNA, 25 bp, probe
tttctggtcttacatgatggtggca

SEQ ID NO: 293266 - DNA, 25 bp, probe
tttgcggtgataaccttctctggca

SEQ ID NO: 293267 - DNA, 25 bp, probe
ttctcgggaattcttcaatcgcaga

SEQ ID NO: 293268 - DNA, 25 bp, probe
tattctcgggaattcttcaatcgca

SEQ ID NO: 293269 - DNA, 25 bp, probe
tttgtcgaaagctgcttttccaggg

SEQ ID NO: 293270 - DNA, 25 bp, probe
tttggtatactttgctttttctagg

SEQ ID NO: 293271 - DNA, 25 bp, probe
tattttattttagttgttgtgctaa

SEQ ID NO: 293272 - DNA, 25 bp, probe
tattttattatgttgtctttatcga

SEQ ID NO: 293273 - DNA, 25 bp, probe
tattttattatgttgtctttatcga

SEQ ID NO: 293274 - DNA, 25 bp, probe
tattctactttgttagttatatcat

SEQ ID NO: 293275 - DNA, 25 bp, probe
tattttctgcttctaattattatga

SEQ ID NO: 293276 - DNA, 25 bp, probe
tattcatttgaacacgtttttgaag

SEQ ID NO: 293277 - DNA, 25 bp, probe
tattttgaaaccacatttcttaaga

SEQ ID NO: 293278 - DNA, 25 bp, probe
tattgattaaaaatgtggttgctta

SEQ ID NO: 293279 - DNA, 25 bp, probe
tttgctctcgaaaatgttaatctat

SEQ ID NO: 293280 - DNA, 25 bp, probe
tttgctctcgaaaatgttaatctat

SEQ ID NO: 293281 - DNA, 25 bp, probe
tattttctagacaattctctatttt

SEQ ID NO: 293282 - DNA, 25 bp, probe
tattttgcatgtatatttctttgta

SEQ ID NO: 293283 - DNA, 25 bp, probe
tattgttgcttattgttttgtttat

SEQ ID NO: 293284 - DNA, 25 bp, probe
tttgtggactactttttttatatca

SEQ ID NO: 293285 - DNA, 25 bp, probe
tttgtggactttatttaatttcata

SEQ ID NO: 293286 - DNA, 25 bp, probe
tattgtagacttgttttctctgttt

SEQ ID NO: 293287 - DNA, 25 bp, probe
tattgtctccttggttatatttttt

SEQ ID NO: 293288 - DNA, 25 bp, probe
tattgtctccttggttatatttttt

SEQ ID NO: 293289 - DNA, 25 bp, probe
tattgcatctcctttcttattataa

SEQ ID NO: 293290 - DNA, 25 bp, probe
tattgcatctcctttcttattataa

SEQ ID NO: 293291 - DNA, 25 bp, probe
tattattatctgtctcttgtagtac

SEQ ID NO: 293292 - DNA, 25 bp, probe
tattttgtctacgatgggattatgc

SEQ ID NO: 293293 - DNA, 25 bp, probe
tattttgatcatagcaagagcggat

SEQ ID NO: 293294 - DNA, 25 bp, probe
tattctttctactgagggcattgtc

SEQ ID NO: 293295 - DNA, 25 bp, probe
tattcttttacatggcttctttaat

SEQ ID NO: 293296 - DNA, 25 bp, probe
tattcttttacatggcttctttaat

SEQ ID NO: 293297 - DNA, 25 bp, probe
tattttgcttacatgtgctttttaa

SEQ ID NO: 293298 - DNA, 25 bp, probe
tattttgcttacatgtgctttttaa

SEQ ID NO: 293299 - DNA, 25 bp, probe
tattttgtgtataatgtgctttatt

SEQ ID NO: 293300 - DNA, 25 bp, probe
tattttgtattattgctgttgcttg

SEQ ID NO: 293301 - DNA, 25 bp, probe
tattttgtaatattctgttttgtta

SEQ ID NO: 293302 - DNA, 25 bp, probe
tattactgttcttattgtttttgga

SEQ ID NO: 293303 - DNA, 25 bp, probe
tattccgttctgcttttgtatgagc

SEQ ID NO: 293304 - DNA, 25 bp, probe
tattccgttctgcttttgtatgagc

SEQ ID NO: 293305 - DNA, 25 bp, probe
tattcctaattcctgtatgttatcc

SEQ ID NO: 293306 - DNA, 25 bp, probe
tattgcccaatttttatttcttata

SEQ ID NO: 293307 - DNA, 25 bp, probe
tttgtctaagttctcattctttcaa

SEQ ID NO: 293308 - DNA, 25 bp, probe
tttgtaaatattctacacatgtaaa

SEQ ID NO: 293309 - DNA, 25 bp, probe
tttgtattatttcaccagcagcata

SEQ ID NO: 293310 - DNA, 25 bp, probe
tattgtctttttggagacacagtga

SEQ ID NO: 293311 - DNA, 25 bp, probe
tattgactctattttgtaacttaag

SEQ ID NO: 293312 - DNA, 25 bp, probe
tattactataatatctgcatcttgt

SEQ ID NO: 293313 - DNA, 25 bp, probe
tattcctataattcctatttgtgaa

SEQ ID NO: 293314 - DNA, 25 bp, probe
tattcatttgtatccaaggtgctga

SEQ ID NO: 293315 - DNA, 25 bp, probe
tattcatctagtcccctgggggagg

SEQ ID NO: 293316 - DNA, 25 bp, probe
tattctggaggagcccggggaggat

SEQ ID NO: 293317 - DNA, 25 bp, probe
tattatctgatggaccccagcggga

SEQ ID NO: 293318 - DNA, 25 bp, probe
tttgatgctgtcactaccgtgggaa

SEQ ID NO: 293319 - DNA, 25 bp, probe
tttgaccatctcgggaagtgaggag

SEQ ID NO: 293320 - DNA, 25 bp, probe
tttcaccatgttggccaggctggtc

SEQ ID NO: 293321 - DNA, 25 bp, probe
tttcaccatgttggccaggctggtc

SEQ ID NO: 293322 - DNA, 25 bp, probe
tttcaccatgttggccaggctggtc

SEQ ID NO: 293323 - DNA, 25 bp, probe
tttgcaaaggctgccgagctttcgt

SEQ ID NO: 293324 - DNA, 25 bp, probe
tttgcaaaggctgccgagctttcgt

SEQ ID NO: 293325 - DNA, 25 bp, probe
tttggacaggtggccaagtgcttgg

SEQ ID NO: 293326 - DNA, 25 bp, probe
tttctgtcggtgcaagggcttgagt

SEQ ID NO: 293327 - DNA, 25 bp, probe
tttgtgtaaaaatatggctgtgagt

SEQ ID NO: 293328 - DNA, 25 bp, probe
tttggttattaatagcgtgctggac

SEQ ID NO: 293329 - DNA, 25 bp, probe
tttggttattaatagcgtgctggac

SEQ ID NO: 293330 - DNA, 25 bp, probe
tattggttttggtaatcgatgtgga

SEQ ID NO: 293331 - DNA, 25 bp, probe
tttggtttttaaatctgagaagcct

SEQ ID NO: 293332 - DNA, 25 bp, probe
tttgttccttttgctctgatagaca

SEQ ID NO: 293333 - DNA, 25 bp, probe
tttgtgctatctatggccctgcaaa

SEQ ID NO: 293334 - DNA, 25 bp, probe
tttcgatgactcattacccaatccc

SEQ ID NO: 293335 - DNA, 25 bp, probe
tttcgatgactcattacccaatccc

SEQ ID NO: 293336 - DNA, 25 bp, probe
tttgtgctaccaattctggccttac

SEQ ID NO: 293337 - DNA, 25 bp, probe
tttgtgctaccaattctggccttac

SEQ ID NO: 293338 - DNA, 25 bp, probe
tattgtgatacaagattctgcacct

SEQ ID NO: 293339 - DNA, 25 bp, probe
tattggcatacgttatcagcaactt

SEQ ID NO: 293340 - DNA, 25 bp, probe
tattcacttctggtgccacaactgt

SEQ ID NO: 293341 - DNA, 25 bp, probe
tattcagtctctgtgtaatcatctg

SEQ ID NO: 293342 - DNA, 25 bp, probe
tattattcccattctacatactatg

SEQ ID NO: 293343 - DNA, 25 bp, probe
tattaaccacaatgacgacctgttt

SEQ ID NO: 293344 - DNA, 25 bp, probe
tttagaccaagttgaggtctgttct

SEQ ID NO: 293345 - DNA, 25 bp, probe
tattctcactaagatggggtttatg

SEQ ID NO: 293346 - DNA, 25 bp, probe
tattcttctcgggatggatggctct

SEQ ID NO: 293347 - DNA, 25 bp, probe
tattcttctctttagacgacctctt

SEQ ID NO: 293348 - DNA, 25 bp, probe
tattcttctctttagacgacctctt

SEQ ID NO: 293349 - DNA, 25 bp, probe
tattcttctagatgaacgaggccat

SEQ ID NO: 293350 - DNA, 25 bp, probe
tttgctctctagaaggaaacgtctt

SEQ ID NO: 293351 - DNA, 25 bp, probe
tttggccttctgagaaaagagcttc

SEQ ID NO: 293352 - DNA, 25 bp, probe
tattggccttctacagctattactg

SEQ ID NO: 293353 - DNA, 25 bp, probe
tattggccttctacagctattactg

SEQ ID NO: 293354 - DNA, 25 bp, probe
tattctgattttaagctgttcctgt

SEQ ID NO: 293355 - DNA, 25 bp, probe
tttgtgttgatttcagttctccctc

SEQ ID NO: 293356 - DNA, 25 bp, probe
tattgtttgcttactttatgctcct

SEQ ID NO: 293357 - DNA, 25 bp, probe
tttgtgattttgaccagttctccat

SEQ ID NO: 293358 - DNA, 25 bp, probe
tttggttttacttcatatcatgtgc

SEQ ID NO: 293359 - DNA, 25 bp, probe
tttgtggattgtgtcctatgcgctc

SEQ ID NO: 293360 - DNA, 25 bp, probe
tttgaccactatgtgcacttcagct

SEQ ID NO: 293361 - DNA, 25 bp, probe
tttggatccagagcgacttgagcct

SEQ ID NO: 293362 - DNA, 25 bp, probe
tttggatccagagcgacttgagcct

SEQ ID NO: 293363 - DNA, 25 bp, probe
ttaggtccagcagctacatttacac

SEQ ID NO: 293364 - DNA, 25 bp, probe
ttacgtacgtcctcaattactccaa

SEQ ID NO: 293365 - DNA, 25 bp, probe
ttatgttacccagagaactttccaa

SEQ ID NO: 293366 - DNA, 25 bp, probe
ttagtttccacagtaaggtttgcct

SEQ ID NO: 293367 - DNA, 25 bp, probe
tattgcatattccatttacggtttg

SEQ ID NO: 293368 - DNA, 25 bp, probe
tattgcttatgtctctacatggtat

SEQ ID NO: 293369 - DNA, 25 bp, probe
tattgcttattcattatagctattc

SEQ ID NO: 293370 - DNA, 25 bp, probe
tattgttcattcatattgacctgca

SEQ ID NO: 293371 - DNA, 25 bp, probe
tttgtatcttgttgtatgactgcca

SEQ ID NO: 293372 - DNA, 25 bp, probe
tttgatactcctctgtgaatgctcc

SEQ ID NO: 293373 - DNA, 25 bp, probe
ttatgtgactctttttacatttcct

SEQ ID NO: 293374 - DNA, 25 bp, probe
ttctgtatgcccatgtcaactttgc

SEQ ID NO: 293375 - DNA, 25 bp, probe
tattgctatgtcatttccatcttct

SEQ ID NO: 293376 - DNA, 25 bp, probe
tattgaattctcttagcttgtgtgt

SEQ ID NO: 293377 - DNA, 25 bp, probe
tttggagtcctattgtcgtgcatgt

SEQ ID NO: 293378 - DNA, 25 bp, probe
tttggagttgctctttcacttccat

SEQ ID NO: 293379 - DNA, 25 bp, probe
tttggaatctctccatctgtaattc

SEQ ID NO: 293380 - DNA, 25 bp, probe
tttggagacatccccatgttattct

SEQ ID NO: 293381 - DNA, 25 bp, probe
tttggagatcatgggctgattccat

SEQ ID NO: 293382 - DNA, 25 bp, probe
tattcagagcacagtgatgttagac

SEQ ID NO: 293383 - DNA, 25 bp, probe
tattcagacctattctgcctgagca

SEQ ID NO: 293384 - DNA, 25 bp, probe
tttgtgcacagagatctggctgcaa

SEQ ID NO: 293385 - DNA, 25 bp, probe
tttggcaagaacactgtgcacatgg

SEQ ID NO: 293386 - DNA, 25 bp, probe
tttggagcgaccagctgtcagctgc

SEQ ID NO: 293387 - DNA, 25 bp, probe
tttgggcaagccaagtgccctctct

SEQ ID NO: 293388 - DNA, 25 bp, probe
tttgtgagaagccgtatccacttca

SEQ ID NO: 293389 - DNA, 25 bp, probe
tttgtgagaagccgtatccacttca

SEQ ID NO: 293390 - DNA, 25 bp, probe
tttgctgagacaccagcttcacctt

SEQ ID NO: 293391 - DNA, 25 bp, probe
tttgagcaagccgagctctccttgt

SEQ ID NO: 293392 - DNA, 25 bp, probe
tttgtatgagctgcattgcccttgc

SEQ ID NO: 293393 - DNA, 25 bp, probe
tttgatcaggggaggcctctttgcc

SEQ ID NO: 293394 - DNA, 25 bp, probe
tttgtggtttgctggactccttatc

SEQ ID NO: 293395 - DNA, 25 bp, probe
tttgcgagaattgaagcaccctaat

SEQ ID NO: 293396 - DNA, 25 bp, probe
tttgcgagaattgaagcaccctaat

SEQ ID NO: 293397 - DNA, 25 bp, probe
tttgctgcagaagttaacatcccca

SEQ ID NO: 293398 - DNA, 25 bp, probe
tttgctgcagaagttaacatcccca

SEQ ID NO: 293399 - DNA, 25 bp, probe
tttggctgagtgatactgccctcca

SEQ ID NO: 293400 - DNA, 25 bp, probe
tttggctgatgttcttagccctgct

SEQ ID NO: 293401 - DNA, 25 bp, probe
tttgagttgttttggtgcctgcctc

SEQ ID NO: 293402 - DNA, 25 bp, probe
tttgagataatttaaccctgcctct

SEQ ID NO: 293403 - DNA, 25 bp, probe
tattgaatgtcagtaaacactgctc

SEQ ID NO: 293404 - DNA, 25 bp, probe
tattgcagttcaaatcctcaccatc

SEQ ID NO: 293405 - DNA, 25 bp, probe
tattagttcattgcctgcacttact

SEQ ID NO: 293406 - DNA, 25 bp, probe
tattagcatttagtccaatgtcttt

SEQ ID NO: 293407 - DNA, 25 bp, probe
tattgactcttctaccaagttggta

SEQ ID NO: 293408 - DNA, 25 bp, probe
tattgttttcaatgccagtgggcca

SEQ ID NO: 293409 - DNA, 25 bp, probe
tattgttttcaatgccagtgggcca

SEQ ID NO: 293410 - DNA, 25 bp, probe
tattccttctccaagccagaaacca

SEQ ID NO: 293411 - DNA, 25 bp, probe
tattccttctccaagccagaaacca

SEQ ID NO: 293412 - DNA, 25 bp, probe
tattccttccaatgagagattataa

SEQ ID NO: 293413 - DNA, 25 bp, probe
tattggttccaattagagtttactt

SEQ ID NO: 293414 - DNA, 25 bp, probe
tttggttctgctagtcacgtttcca

SEQ ID NO: 293415 - DNA, 25 bp, probe
tttggcttggctcgacaatttacca

SEQ ID NO: 293416 - DNA, 25 bp, probe
tttggcttggctcgaatcatcgaca

SEQ ID NO: 293417 - DNA, 25 bp, probe
tttggctataaccagtctcagcaag

SEQ ID NO: 293418 - DNA, 25 bp, probe
tttctgctaattcgagtcatggcta

SEQ ID NO: 293419 - DNA, 25 bp, probe
tttctctagagtcagtcattatgaa

SEQ ID NO: 293420 - DNA, 25 bp, probe
tattcctgacaaaagttccatatag

SEQ ID NO: 293421 - DNA, 25 bp, probe
tattcctgacaagacttggaaaagc

SEQ ID NO: 293422 - DNA, 25 bp, probe
tttccggcacatgaattgggacgac

SEQ ID NO: 293423 - DNA, 25 bp, probe
tttcctactctgcaagtggacgaga

SEQ ID NO: 293424 - DNA, 25 bp, probe
tttcctactctgcaagtggacgaga

SEQ ID NO: 293425 - DNA, 25 bp, probe
tttcttccatggggcgtggcaaggg

SEQ ID NO: 293426 - DNA, 25 bp, probe
tttgctaccagccgaggctgtgcgg

SEQ ID NO: 293427 - DNA, 25 bp, probe
tttgctaccagccgaggctgtgcgg

SEQ ID NO: 293428 - DNA, 25 bp, probe
tattctcacatacctgaggcagccc

SEQ ID NO: 293429 - DNA, 25 bp, probe
tattctactggccatgatgccactg

SEQ ID NO: 293430 - DNA, 25 bp, probe
tattcttgcagcccatcagatcatc

SEQ ID NO: 293431 - DNA, 25 bp, probe
tattctctgcgtgttgcactgcata

SEQ ID NO: 293432 - DNA, 25 bp, probe
tattgcgtggtgtctccgcagtgag

SEQ ID NO: 293433 - DNA, 25 bp, probe
tttgggttgtctgaagtgacttccg

SEQ ID NO: 293434 - DNA, 25 bp, probe
tttgggatttgtagttgcgacttct

SEQ ID NO: 293435 - DNA, 25 bp, probe
tttggtattttttctggcatgcgtt

SEQ ID NO: 293436 - DNA, 25 bp, probe
tttggtattttttctggcatgcgtt

SEQ ID NO: 293437 - DNA, 25 bp, probe
tttgctgccgtggtttcaggatcgc

SEQ ID NO: 293438 - DNA, 25 bp, probe
tttcaccggcgcaagatgcaggtcc

SEQ ID NO: 293439 - DNA, 25 bp, probe
tttcaccggcgcaagatgcaggtcc

SEQ ID NO: 293440 - DNA, 25 bp, probe
tttcaccggcgcaagatgcaggtcc

SEQ ID NO: 293441 - DNA, 25 bp, probe
tttagcaggctgcagcaggcagagg

SEQ ID NO: 293442 - DNA, 25 bp, probe
tattgaaatcgttgaagcgagagaa

SEQ ID NO: 293443 - DNA, 25 bp, probe
tttgaaatcgtaaagcgagctgacg

SEQ ID NO: 293444 - DNA, 25 bp, probe
ttatagtgacgtaaactgtatgaca

SEQ ID NO: 293445 - DNA, 25 bp, probe
ttatagtgacgtaaactgtatgaca

SEQ ID NO: 293446 - DNA, 25 bp, probe
tttgagtacgtcaagaatgaggacc

SEQ ID NO: 293447 - DNA, 25 bp, probe
tttggtctcaccaaggaggcgtcca

SEQ ID NO: 293448 - DNA, 25 bp, probe
tttgcgtgtacgaaggaagaatcct

SEQ ID NO: 293449 - DNA, 25 bp, probe
tttgcgtgtacgaaggaagaatcct

SEQ ID NO: 293450 - DNA, 25 bp, probe
tttggtgtcaacagctcacaggagc

SEQ ID NO: 293451 - DNA, 25 bp, probe
tttggtggatgacgtgccaaggagc

SEQ ID NO: 293452 - DNA, 25 bp, probe
tttggccgctgagggcacaaggaat

SEQ ID NO: 293453 - DNA, 25 bp, probe
tttggccgctgagggcacaaggaat

SEQ ID NO: 293454 - DNA, 25 bp, probe
tttgtccgctgctggtcaccagaat

SEQ ID NO: 293455 - DNA, 25 bp, probe
tttgtcagcctgaagtttcgaaaga

SEQ ID NO: 293456 - DNA, 25 bp, probe
tttactgacttgtttgatcgaaaag

SEQ ID NO: 293457 - DNA, 25 bp, probe
tttccaacttgctcatgaccgacaa

SEQ ID NO: 293458 - DNA, 25 bp, probe
tttccaacttgctcatgaccgacaa

SEQ ID NO: 293459 - DNA, 25 bp, probe
tattccctcctggacatgaggccac

SEQ ID NO: 293460 - DNA, 25 bp, probe
tattccgcatttacaatgccgccag

SEQ ID NO: 293461 - DNA, 25 bp, probe
tattcccattctacatactatggaa

SEQ ID NO: 293462 - DNA, 25 bp, probe
tattctaatcctactgactattctc

SEQ ID NO: 293463 - DNA, 25 bp, probe
tattgttacaaagtactcttccaaa

SEQ ID NO: 293464 - DNA, 25 bp, probe
tattgtttcaattctttacaccaaa

SEQ ID NO: 293465 - DNA, 25 bp, probe
tattgtttcctgtgctggagcaaaa

SEQ ID NO: 293466 - DNA, 25 bp, probe
tattgtaatctccctcaaagaaaat

SEQ ID NO: 293467 - DNA, 25 bp, probe
tttgtacatatgccctaggaaaatt

SEQ ID NO: 293468 - DNA, 25 bp, probe
tttggcatcttgctctgggagacct

SEQ ID NO: 293469 - DNA, 25 bp, probe
tttgagctcctgggcaagaacacct

SEQ ID NO: 293470 - DNA, 25 bp, probe
tttgatgtctccaagtagtccacct

SEQ ID NO: 293471 - DNA, 25 bp, probe
tttgtggctctcagaaactcaatca

SEQ ID NO: 293472 - DNA, 25 bp, probe
ttttgcagattcttgcaacctcctc

SEQ ID NO: 293473 - DNA, 25 bp, probe
tttgtgcttatcttcaaggctggct

SEQ ID NO: 293474 - DNA, 25 bp, probe
ttttgaaatcgtaaagcgagctgac

SEQ ID NO: 293475 - DNA, 25 bp, probe
tttctgcctaggataaggagctgaa

SEQ ID NO: 293476 - DNA, 25 bp, probe
tttccctcagagagaatccagtgga

SEQ ID NO: 293477 - DNA, 25 bp, probe
tttccttgatagggtgctgccatgg

SEQ ID NO: 293478 - DNA, 25 bp, probe
tttcagccaataggagccagccagg

SEQ ID NO: 293479 - DNA, 25 bp, probe
tttcaccttaccactgacaggtcgt

SEQ ID NO: 293480 - DNA, 25 bp, probe
tttgggtctaccagagtcagagatc

SEQ ID NO: 293481 - DNA, 25 bp, probe
tttgggtctaccagagtcagagatc

SEQ ID NO: 293482 - DNA, 25 bp, probe
tttgtggtctaccttcagcaagtgt

SEQ ID NO: 293483 - DNA, 25 bp, probe
tttgggtctctactgtatgaactgc

SEQ ID NO: 293484 - DNA, 25 bp, probe
tttgtggctgtttccttcaacacat

SEQ ID NO: 293485 - DNA, 25 bp, probe
tttgggctgtatagctctttacaga

SEQ ID NO: 293486 - DNA, 25 bp, probe
tttggccatgttagcctggtcaaga

SEQ ID NO: 293487 - DNA, 25 bp, probe
tttgacctgctctcactggtaaggt

SEQ ID NO: 293488 - DNA, 25 bp, probe
tttgaacctccaacagggaaggctc

SEQ ID NO: 293489 - DNA, 25 bp, probe
tttgaaactcatctggtggaaacca

SEQ ID NO: 293490 - DNA, 25 bp, probe
tttgaaagctcgccgggcggcaatc

SEQ ID NO: 293491 - DNA, 25 bp, probe
tttgtgatttcacctgggcagggac

SEQ ID NO: 293492 - DNA, 25 bp, probe
tttgtgactgttacattgtgcaggg

SEQ ID NO: 293493 - DNA, 25 bp, probe
tattcttccatcaactcatggcagg

SEQ ID NO: 293494 - DNA, 25 bp, probe
tattctcacaaatccaggcatatgt

SEQ ID NO: 293495 - DNA, 25 bp, probe
tattctgcccattaacagtgctttg

SEQ ID NO: 293496 - DNA, 25 bp, probe
tattctgcccattaacagtgctttg

SEQ ID NO: 293497 - DNA, 25 bp, probe
tattcggacaagtacggccttgggt

SEQ ID NO: 293498 - DNA, 25 bp, probe
tttccaacaggatcacagacctggg

SEQ ID NO: 293499 - DNA, 25 bp, probe
tttgccaacaggtagcatagctctg

SEQ ID NO: 293500 - DNA, 25 bp, probe
tttgtgaaaaaagagcttgttaatg

SEQ ID NO: 293501 - DNA, 25 bp, probe
tttgtgaagtgaacaatactttgta

SEQ ID NO: 293502 - DNA, 25 bp, probe
tttgtaagatgacagatgatgctgt

SEQ ID NO: 293503 - DNA, 25 bp, probe
ttttgcagctggtcatgagattgtg

SEQ ID NO: 293504 - DNA, 25 bp, probe
ttttgcagctggtcatgagattgtg

SEQ ID NO: 293505 - DNA, 25 bp, probe
tattctcagatgactctgtgttttt

SEQ ID NO: 293506 - DNA, 25 bp, probe
tattctatgcattgtttgtctttta

SEQ ID NO: 293507 - DNA, 25 bp, probe
tattctcattcttaggtgcatttta

SEQ ID NO: 293508 - DNA, 25 bp, probe
tattgtcggtatcggagttcttata

SEQ ID NO: 293509 - DNA, 25 bp, probe
tttgctgggtacgtgactatcccta

SEQ ID NO: 293510 - DNA, 25 bp, probe
tttgctgtggggccacgaatcccta

SEQ ID NO: 293511 - DNA, 25 bp, probe
tttgcattgccaagtgccataacca

SEQ ID NO: 293512 - DNA, 25 bp, probe
tttgaacagcattgtaaaatggcac

SEQ ID NO: 293513 - DNA, 25 bp, probe
tattgaaaatatactttagagcaca

SEQ ID NO: 293514 - DNA, 25 bp, probe
tattgaataatccttgttagagtta

SEQ ID NO: 293515 - DNA, 25 bp, probe
tttgctctaatcctccattaagcga

SEQ ID NO: 293516 - DNA, 25 bp, probe
tttgtctaacacatttcaaggatag

SEQ ID NO: 293517 - DNA, 25 bp, probe
tttgtgtaattcattttgaggaaaa

SEQ ID NO: 293518 - DNA, 25 bp, probe
tttgattgactccgttattccgaaa

SEQ ID NO: 293519 - DNA, 25 bp, probe
tttgatatacccttcaattgccaaa

SEQ ID NO: 293520 - DNA, 25 bp, probe
tttgaaaaacttcactgcccagaag

SEQ ID NO: 293521 - DNA, 25 bp, probe
tttgaataaactacaacaacacagt

SEQ ID NO: 293522 - DNA, 25 bp, probe
tttgatgaagaatttacagctcaga

SEQ ID NO: 293523 - DNA, 25 bp, probe
tttgtgccacaagttaagatgctac

SEQ ID NO: 293524 - DNA, 25 bp, probe
tttgtgcccattgtagctgaggagg

SEQ ID NO: 293525 - DNA, 25 bp, probe
tttgtgcccattgtagctgaggagg

SEQ ID NO: 293526 - DNA, 25 bp, probe
tttgtcccttctacaggcatgagga

SEQ ID NO: 293527 - DNA, 25 bp, probe
tttccttgctatcaggatgcatagg

SEQ ID NO: 293528 - DNA, 25 bp, probe
tttgtacactatctggcacatatgc

SEQ ID NO: 293529 - DNA, 25 bp, probe
tttgtcatactaagtgtctcctgta

SEQ ID NO: 293530 - DNA, 25 bp, probe
tttgtcatactaagtgtctcctgta

SEQ ID NO: 293531 - DNA, 25 bp, probe
tttgtctcagcatcagtatatccca

SEQ ID NO: 293532 - DNA, 25 bp, probe
tttgttacatggatagattgcctag

SEQ ID NO: 293533 - DNA, 25 bp, probe
tttgcctacggcatagttctgacat

SEQ ID NO: 293534 - DNA, 25 bp, probe
tttgcctacggcatagttctgacat

SEQ ID NO: 293535 - DNA, 25 bp, probe
tttgttatcggccttgtgtcagcag

SEQ ID NO: 293536 - DNA, 25 bp, probe
tttgctgatgacccagtgctgtgtc

SEQ ID NO: 293537 - DNA, 25 bp, probe
tttgctgatgacccagtgctgtgtc

SEQ ID NO: 293538 - DNA, 25 bp, probe
tttgctggtcagcagtttgtcccac

SEQ ID NO: 293539 - DNA, 25 bp, probe
tttatgtaaggggtttcctgcagaa

SEQ ID NO: 293540 - DNA, 25 bp, probe
ttttctccaggggcatcccttggag

SEQ ID NO: 293541 - DNA, 25 bp, probe
tttttctctggtggcattcctttag

SEQ ID NO: 293542 - DNA, 25 bp, probe
tattgtattgtgtctggttcctgtc

SEQ ID NO: 293543 - DNA, 25 bp, probe
tttgtttggaatcgtgccactgctg

SEQ ID NO: 293544 - DNA, 25 bp, probe
tttgttggtaacttgccacatgata

SEQ ID NO: 293545 - DNA, 25 bp, probe
tttgtacggaccataaatataactg

SEQ ID NO: 293546 - DNA, 25 bp, probe
ttccccggaacctcagaacaattga

SEQ ID NO: 293547 - DNA, 25 bp, probe
tttccccggaacctcagaacaattg

SEQ ID NO: 293548 - DNA, 25 bp, probe
tttgccctggagttttagaaaatag

SEQ ID NO: 293549 - DNA, 25 bp, probe
tattcctcccacaggaagaaatgta

SEQ ID NO: 293550 - DNA, 25 bp, probe
tattgcatctccgccaggctaaaag

SEQ ID NO: 293551 - DNA, 25 bp, probe
tttgacccagcccagaatgaacacg

SEQ ID NO: 293552 - DNA, 25 bp, probe
ttttcccgttggagacacatctgga

SEQ ID NO: 293553 - DNA, 25 bp, probe
tttttccccgaactgacagcaacga

SEQ ID NO: 293554 - DNA, 25 bp, probe
tttgttccccactggagcagaaggg

SEQ ID NO: 293555 - DNA, 25 bp, probe
tttgttccccactggagcagaaggg

SEQ ID NO: 293556 - DNA, 25 bp, probe
tttgttccttaccttgaagctgtgg

SEQ ID NO: 293557 - DNA, 25 bp, probe
tttgttcatctataatttaggggtt

SEQ ID NO: 293558 - DNA, 25 bp, probe
tttgtacttaatatttcaggcttgt

SEQ ID NO: 293559 - DNA, 25 bp, probe
tttgtatttttgactttgctagttt

SEQ ID NO: 293560 - DNA, 25 bp, probe
tttgttttgtagcctgcttttgctt

SEQ ID NO: 293561 - DNA, 25 bp, probe
tttgcttcattggaccgtttagaat

SEQ ID NO: 293562 - DNA, 25 bp, probe
tttcgattcgaaccccttcaaatga

SEQ ID NO: 293563 - DNA, 25 bp, probe
tttgtttagagccctccgtaaatat

SEQ ID NO: 293564 - DNA, 25 bp, probe
ttagctaaaaccttccatgtcaaga

SEQ ID NO: 293565 - DNA, 25 bp, probe
ttagacatcgtagcttcacattaag

SEQ ID NO: 293566 - DNA, 25 bp, probe
ttagacatcgtagcttcacattaag

SEQ ID NO: 293567 - DNA, 25 bp, probe
ttagcttggccaggcctagctctac

SEQ ID NO: 293568 - DNA, 25 bp, probe
ttagcttggccaggcctagctctac

SEQ ID NO: 293569 - DNA, 25 bp, probe
tttgcttggcaacacgacttgaaat

SEQ ID NO: 293570 - DNA, 25 bp, probe
tttgcttggcaacacgacttgaaat

SEQ ID NO: 293571 - DNA, 25 bp, probe
tttgcttgtgtacaaacccagattg

SEQ ID NO: 293572 - DNA, 25 bp, probe
tttgctatgtctacgaacgcctcaa

SEQ ID NO: 293573 - DNA, 25 bp, probe
tttgctttgctgaccaaatgcctgg

SEQ ID NO: 293574 - DNA, 25 bp, probe
tattgagtacatcgccaagtgcctc

SEQ ID NO: 293575 - DNA, 25 bp, probe
tattgagtccctgcagcgtgagatc

SEQ ID NO: 293576 - DNA, 25 bp, probe
tattgagtccctgcagcgtgagatc

SEQ ID NO: 293577 - DNA, 25 bp, probe
tattggttcagcaagagaggcagac

SEQ ID NO: 293578 - DNA, 25 bp, probe
tattgagaccatcatagagatcgat

SEQ ID NO: 293579 - DNA, 25 bp, probe
tattccaggcagctcaatgattatc

SEQ ID NO: 293580 - DNA, 25 bp, probe
tattccagcatccttctatatctga

SEQ ID NO: 293581 - DNA, 25 bp, probe
tattccatatctttgttttaaccag

SEQ ID NO: 293582 - DNA, 25 bp, probe
tttcgattcatctacatttcttcac

SEQ ID NO: 293583 - DNA, 25 bp, probe
tttggtctattgtctgtatttgccg

SEQ ID NO: 293584 - DNA, 25 bp, probe
tttggcctacattctttattctgcg

SEQ ID NO: 293585 - DNA, 25 bp, probe
tttggacatcaatgtccttgtcttt

SEQ ID NO: 293586 - DNA, 25 bp, probe
tattgacccaaaggccatctttatt

SEQ ID NO: 293587 - DNA, 25 bp, probe
ttttccaccaaggtacctacattct

SEQ ID NO: 293588 - DNA, 25 bp, probe
tttggctaaagaggaaccaacttct

SEQ ID NO: 293589 - DNA, 25 bp, probe
tttggctgaacatcgagaggccctc

SEQ ID NO: 293590 - DNA, 25 bp, probe
tttgttgataagccggggcccttcg

SEQ ID NO: 293591 - DNA, 25 bp, probe
tttgttgataagccggggcccttcg

SEQ ID NO: 293592 - DNA, 25 bp, probe
tttgttgataagccggggcccttcg

SEQ ID NO: 293593 - DNA, 25 bp, probe
tttgtggagaaggggggccgtctgc

SEQ ID NO: 293594 - DNA, 25 bp, probe
tttgtaagatactgggttggtgcac

SEQ ID NO: 293595 - DNA, 25 bp, probe
tttgtattatacagtacctttctca

SEQ ID NO: 293596 - DNA, 25 bp, probe
tttgtattatacagtacctttctca

SEQ ID NO: 293597 - DNA, 25 bp, probe
tattgtgtttacctcttactttcta

SEQ ID NO: 293598 - DNA, 25 bp, probe
tattgtttttattccacacttccta

SEQ ID NO: 293599 - DNA, 25 bp, probe
tttggaattctgagccagcactttc

SEQ ID NO: 293600 - DNA, 25 bp, probe
tttggaattctgagccagcactttc

SEQ ID NO: 293601 - DNA, 25 bp, probe
tttggacacttgggtcacctgaccc

SEQ ID NO: 293602 - DNA, 25 bp, probe
tttggatgacttacaatagctctga

SEQ ID NO: 293603 - DNA, 25 bp, probe
tttgagtgatcctccaacttcattt

SEQ ID NO: 293604 - DNA, 25 bp, probe
tttgaggtgcaaaaaacatacatat

SEQ ID NO: 293605 - DNA, 25 bp, probe
tttatgatgccaacaaaactacttc

SEQ ID NO: 293606 - DNA, 25 bp, probe
ttttgtggggtgtaactactagctt

SEQ ID NO: 293607 - DNA, 25 bp, probe
tattgtggatggcatgggcattacg

SEQ ID NO: 293608 - DNA, 25 bp, probe
tattgctggcagctattgtattaaa

SEQ ID NO: 293609 - DNA, 25 bp, probe
tttgctatgcgttatggaattgaat

SEQ ID NO: 293610 - DNA, 25 bp, probe
tttgttgcctgttgaggagccaatt

SEQ ID NO: 293611 - DNA, 25 bp, probe
tttgttgcctgttgaggagccaatt

SEQ ID NO: 293612 - DNA, 25 bp, probe
tttgattctggttacagtgccataa

SEQ ID NO: 293613 - DNA, 25 bp, probe
tttgaccgagtctacactcaccaga

SEQ ID NO: 293614 - DNA, 25 bp, probe
tttaccggtagaattcacaccctct

SEQ ID NO: 293615 - DNA, 25 bp, probe
tttacccaccagattacaatcctga

SEQ ID NO: 293616 - DNA, 25 bp, probe
tttgagcccccacaagacaatcaaa

SEQ ID NO: 293617 - DNA, 25 bp, probe
tttgccctgaccctaaataatacat

SEQ ID NO: 293618 - DNA, 25 bp, probe
tttggcaccactctctgaaacaaca

SEQ ID NO: 293619 - DNA, 25 bp, probe
tttgacctacttgctggggtacagt

SEQ ID NO: 293620 - DNA, 25 bp, probe
tttggattccttggtggaggaaaat

SEQ ID NO: 293621 - DNA, 25 bp, probe
tttcctctgccttcggagggaaatt

SEQ ID NO: 293622 - DNA, 25 bp, probe
tttgtcgcctttcctgggtgacaat

SEQ ID NO: 293623 - DNA, 25 bp, probe
tttgtggacttcactgctcagtgcc

SEQ ID NO: 293624 - DNA, 25 bp, probe
tttgagaacttcacttacgcgggca

SEQ ID NO: 293625 - DNA, 25 bp, probe
tttgaggacttggactttccaggaa

SEQ ID NO: 293626 - DNA, 25 bp, probe
tttgagtacttgcagagcttcctgg

SEQ ID NO: 293627 - DNA, 25 bp, probe
tttgtggaccagccagggtcctgtg

SEQ ID NO: 293628 - DNA, 25 bp, probe
tttgggcagctaccacgggtctgcc

SEQ ID NO: 293629 - DNA, 25 bp, probe
tttggtgtgctattcactgatggtc

SEQ ID NO: 293630 - DNA, 25 bp, probe
tttgatgctgtcagcactctgaggg

SEQ ID NO: 293631 - DNA, 25 bp, probe
tttgatcctcaaagcctgtgtggtc

SEQ ID NO: 293632 - DNA, 25 bp, probe
tttgactctcaaacgttgctaccga

SEQ ID NO: 293633 - DNA, 25 bp, probe
tttgactctcaaacgttgctaccga

SEQ ID NO: 293634 - DNA, 25 bp, probe
tttgatcatcttcagggcccacaaa

SEQ ID NO: 293635 - DNA, 25 bp, probe
tttggctgcttctacggccatgaga

SEQ ID NO: 293636 - DNA, 25 bp, probe
tttgagctgctcccaagagcacggg

SEQ ID NO: 293637 - DNA, 25 bp, probe
tttgcagagctcctgacaggccagc

SEQ ID NO: 293638 - DNA, 25 bp, probe
tttgcagagctcctgacaggccagc

SEQ ID NO: 293639 - DNA, 25 bp, probe
tttgcaagagcgcagaccaccgcgc

SEQ ID NO: 293640 - DNA, 25 bp, probe
tttcaagcagagcacattcccagct

SEQ ID NO: 293641 - DNA, 25 bp, probe
tttgcatggcatgaacagtttagct

SEQ ID NO: 293642 - DNA, 25 bp, probe
tttgcatgtctgcatgaaggtctac

SEQ ID NO: 293643 - DNA, 25 bp, probe
tattgcgccgctagaggtgaaattc

SEQ ID NO: 293644 - DNA, 25 bp, probe
tttggcatgtgtaaagagaatatct

SEQ ID NO: 293645 - DNA, 25 bp, probe
tttggctctttttggtatatgttct

SEQ ID NO: 293646 - DNA, 25 bp, probe
tttggctctttttggtatatgttct

SEQ ID NO: 293647 - DNA, 25 bp, probe
tttgagtttgtttttcttttgctat

SEQ ID NO: 293648 - DNA, 25 bp, probe
tttgttttctaatacctcttgtcat

SEQ ID NO: 293649 - DNA, 25 bp, probe
tttctctattaaaggaacttcgtca

SEQ ID NO: 293650 - DNA, 25 bp, probe
tttccatttacttaagacttaatga

SEQ ID NO: 293651 - DNA, 25 bp, probe
tttccagtccactgaaacaccctga

SEQ ID NO: 293652 - DNA, 25 bp, probe
tttccgacgcattcggaattccgga

SEQ ID NO: 293653 - DNA, 25 bp, probe
tattgacagatccttgcggcaatta

SEQ ID NO: 293654 - DNA, 25 bp, probe
tttgaatgcagccatgtcgtcgtct

SEQ ID NO: 293655 - DNA, 25 bp, probe
tttgaatgcagccatgtcgtcgtct

SEQ ID NO: 293656 - DNA, 25 bp, probe
tattgaatggcactgtcttctggct

SEQ ID NO: 293657 - DNA, 25 bp, probe
tttgaatggcctctttgtgaccagc

SEQ ID NO: 293658 - DNA, 25 bp, probe
tattgaaggcctcatcttcatcaac

SEQ ID NO: 293659 - DNA, 25 bp, probe
tttgacatgagcatccacttccaga

SEQ ID NO: 293660 - DNA, 25 bp, probe
tttgacatgagcatccacttccaga

SEQ ID NO: 293661 - DNA, 25 bp, probe
tttgacatgagcatccacttccaga

SEQ ID NO: 293662 - DNA, 25 bp, probe
tttgtcatttgcaaccagtttcaga

SEQ ID NO: 293663 - DNA, 25 bp, probe
tttggcctctgcaaagagggcatca

SEQ ID NO: 293664 - DNA, 25 bp, probe
tttggtctcttctatgcagtgggca

SEQ ID NO: 293665 - DNA, 25 bp, probe
tttgagactcttttcactgcagtgg

SEQ ID NO: 293666 - DNA, 25 bp, probe
tttgagacctattctgaccaaacta

SEQ ID NO: 293667 - DNA, 25 bp, probe
tttgacaccgtggctgacaagatcc

SEQ ID NO: 293668 - DNA, 25 bp, probe
tttgtccacgtggcggagaagctgc

SEQ ID NO: 293669 - DNA, 25 bp, probe
tttgtcccacctgggagaatgtgcc

SEQ ID NO: 293670 - DNA, 25 bp, probe
tttgtcccacctgggagaatgtgcc

SEQ ID NO: 293671 - DNA, 25 bp, probe
tattgtcgtgcatgtgggatgtatt

SEQ ID NO: 293672 - DNA, 25 bp, probe
tttgagctggcaatgggcgattatt

SEQ ID NO: 293673 - DNA, 25 bp, probe
tttgcagccagaccgatgtgtattt

SEQ ID NO: 293674 - DNA, 25 bp, probe
tttgcagccagaccgatgtgtattt

SEQ ID NO: 293675 - DNA, 25 bp, probe
tttggatgctgaaccttgtttgtca

SEQ ID NO: 293676 - DNA, 25 bp, probe
tttgtatgctagtcatgttcttggt

SEQ ID NO: 293677 - DNA, 25 bp, probe
tttgtgatcgatctgctgtcttgtt

SEQ ID NO: 293678 - DNA, 25 bp, probe
tttgtagcctgcttttgctttcaca

SEQ ID NO: 293679 - DNA, 25 bp, probe
tttgtagacctttgctatttctcag

SEQ ID NO: 293680 - DNA, 25 bp, probe
tttctaactctatttagggccaaga

SEQ ID NO: 293681 - DNA, 25 bp, probe
tttctaactccttattgaagctaag

SEQ ID NO: 293682 - DNA, 25 bp, probe
tttgtacaaccttactgcacactta

SEQ ID NO: 293683 - DNA, 25 bp, probe
tttgtatcaacagttcctagctctt

SEQ ID NO: 293684 - DNA, 25 bp, probe
tttgtgtgattctgtcctacttgta

SEQ ID NO: 293685 - DNA, 25 bp, probe
tttcagtattaaactctcctttgat

SEQ ID NO: 293686 - DNA, 25 bp, probe
tttggtgattaaactccattgttca

SEQ ID NO: 293687 - DNA, 25 bp, probe
tttggaattataaagtcatctcttc

SEQ ID NO: 293688 - DNA, 25 bp, probe
tttgtgaagtgtacctgttcttgtc

SEQ ID NO: 293689 - DNA, 25 bp, probe
tattgataatgttttgctactcttg

SEQ ID NO: 293690 - DNA, 25 bp, probe
tttgatggatgctacttctatttgt

SEQ ID NO: 293691 - DNA, 25 bp, probe
tttgatggatgctacttctatttgt

SEQ ID NO: 293692 - DNA, 25 bp, probe
tattgatgttgacatgtccatgtag

SEQ ID NO: 293693 - DNA, 25 bp, probe
tttgagttcatgctgtcggatctgg

SEQ ID NO: 293694 - DNA, 25 bp, probe
tttgtgatctcacctgttggaatgc

SEQ ID NO: 293695 - DNA, 25 bp, probe
tttgtatctcacctgtcatggatga

SEQ ID NO: 293696 - DNA, 25 bp, probe
ttttatctcactctagtccaggtgc

SEQ ID NO: 293697 - DNA, 25 bp, probe
tttgtttcacatgatttcagggatc

SEQ ID NO: 293698 - DNA, 25 bp, probe
tttgtgttcctggtggtgagcgttc

SEQ ID NO: 293699 - DNA, 25 bp, probe
tttgtcttcattggggttggttgct

SEQ ID NO: 293700 - DNA, 25 bp, probe
ttttccacatggcaaggggtctcct

SEQ ID NO: 293701 - DNA, 25 bp, probe
tttccactacaccagggggtctaca

SEQ ID NO: 293702 - DNA, 25 bp, probe
tttccactacaccagggggtctaca

SEQ ID NO: 293703 - DNA, 25 bp, probe
tttccctatgattcatggggaactc

SEQ ID NO: 293704 - DNA, 25 bp, probe
tttgaaccacattctggggaagact

SEQ ID NO: 293705 - DNA, 25 bp, probe
tttggatcgcccgagtgggacgatt

SEQ ID NO: 293706 - DNA, 25 bp, probe
tttggctcgcccgagtgggatgatt

SEQ ID NO: 293707 - DNA, 25 bp, probe
tttggaggccgttgatgtggtgttt

SEQ ID NO: 293708 - DNA, 25 bp, probe
tttgggtgccagagatctgatgctg

SEQ ID NO: 293709 - DNA, 25 bp, probe
tttggagtgtcagcagctatagtga

SEQ ID NO: 293710 - DNA, 25 bp, probe
tttggaatattccactatttgcaga

SEQ ID NO: 293711 - DNA, 25 bp, probe
tttggaatattccactatttgcaga

SEQ ID NO: 293712 - DNA, 25 bp, probe
tattggacagacacactcatcctct

SEQ ID NO: 293713 - DNA, 25 bp, probe
tttggccagcataacctctagcatc

SEQ ID NO: 293714 - DNA, 25 bp, probe
tattgtgctcagagacactgttgat

SEQ ID NO: 293715 - DNA, 25 bp, probe
tattggccatctggaatatgcatta

SEQ ID NO: 293716 - DNA, 25 bp, probe
tttgtgcctgtgcagattgcaatag

SEQ ID NO: 293717 - DNA, 25 bp, probe
tttggccttgctagagtaattgaag

SEQ ID NO: 293718 - DNA, 25 bp, probe
tttgtccttttgatgcaaatcagaa

SEQ ID NO: 293719 - DNA, 25 bp, probe
tttgatcctttgtactctataatgt

SEQ ID NO: 293720 - DNA, 25 bp, probe
tttgtctcgtgttcatgatgttaag

SEQ ID NO: 293721 - DNA, 25 bp, probe
tttgtcctgttcttggtcatgtatg

SEQ ID NO: 293722 - DNA, 25 bp, probe
tttgggatgattcaggctctgacag

SEQ ID NO: 293723 - DNA, 25 bp, probe
tttggagtgttgatgtgggaagcat

SEQ ID NO: 293724 - DNA, 25 bp, probe
tttggaatttaccggctgagagatg

SEQ ID NO: 293725 - DNA, 25 bp, probe
ttcggaacttaccccgagaatgact

SEQ ID NO: 293726 - DNA, 25 bp, probe
ttttagccctaggcccgaaatgact

SEQ ID NO: 293727 - DNA, 25 bp, probe
tttaaggaccagaaccaggaatact

SEQ ID NO: 293728 - DNA, 25 bp, probe
tttgacagggccgtcaccgaatatg

SEQ ID NO: 293729 - DNA, 25 bp, probe
ttaagaagtgccgtcctcgaacttt

SEQ ID NO: 293730 - DNA, 25 bp, probe
ttaaaaaggcctttgcatacacctt

SEQ ID NO: 293731 - DNA, 25 bp, probe
tttaaagagaacactggacaacatt

SEQ ID NO: 293732 - DNA, 25 bp, probe
tttgaagtacagtggtgaaaacatt

SEQ ID NO: 293733 - DNA, 25 bp, probe
tttgaaaactgcggtggaggaagtt

SEQ ID NO: 293734 - DNA, 25 bp, probe
tttgaaaacttgttcgcacgttgtt

SEQ ID NO: 293735 - DNA, 25 bp, probe
tttgaaccactttctagcaaatgtg

SEQ ID NO: 293736 - DNA, 25 bp, probe
tttgaagccatcaacatcacaaata

SEQ ID NO: 293737 - DNA, 25 bp, probe
tttgagtgtcataactccacagatc

SEQ ID NO: 293738 - DNA, 25 bp, probe
tttgtatctctaagttacatgacct

SEQ ID NO: 293739 - DNA, 25 bp, probe
tttgtctttgtaatgtcaccacctt

SEQ ID NO: 293740 - DNA, 25 bp, probe
tttggccaagtagtggcagccatcc

SEQ ID NO: 293741 - DNA, 25 bp, probe
tttccacaaacagtggcactcccag

SEQ ID NO: 293742 - DNA, 25 bp, probe
tttccacaaacagtggcactcccag

SEQ ID NO: 293743 - DNA, 25 bp, probe
tttgtcacggaaagcatcctctcca

SEQ ID NO: 293744 - DNA, 25 bp, probe
tttgctttggaaacacccactcact

SEQ ID NO: 293745 - DNA, 25 bp, probe
tttgctttgcgtaccaagtggccaa

SEQ ID NO: 293746 - DNA, 25 bp, probe
tttgcttctggtagtaaggagcaca

SEQ ID NO: 293747 - DNA, 25 bp, probe
tttccttcggtttgatgctgacaag

SEQ ID NO: 293748 - DNA, 25 bp, probe
tttcctccggcggacagctgcttac

SEQ ID NO: 293749 - DNA, 25 bp, probe
tttcctctcgaaagccagctttacc

SEQ ID NO: 293750 - DNA, 25 bp, probe
tttcctctcgaaagccagctttacc

SEQ ID NO: 293751 - DNA, 25 bp, probe
tttctttgggaactctgtctttctc

SEQ ID NO: 293752 - DNA, 25 bp, probe
ttttcgtgccggttttcagctatta

SEQ ID NO: 293753 - DNA, 25 bp, probe
tttcctgttaggtgcttcgtctgaa

SEQ ID NO: 293754 - DNA, 25 bp, probe
tttcctgttaggtgcttcgtctgaa

SEQ ID NO: 293755 - DNA, 25 bp, probe
tttgcattgtaaatagtctttgttg

SEQ ID NO: 293756 - DNA, 25 bp, probe
tttcatttgagcaatttctatagga

SEQ ID NO: 293757 - DNA, 25 bp, probe
tttgtcttggatattcttgaaagtt

SEQ ID NO: 293758 - DNA, 25 bp, probe
tttgttattgatatctcggatacaa

SEQ ID NO: 293759 - DNA, 25 bp, probe
tttggtcactgcaccatcgtgatca

SEQ ID NO: 293760 - DNA, 25 bp, probe
tttggtcactgcaccatcgtgatca

SEQ ID NO: 293761 - DNA, 25 bp, probe
tttgcgctcggtgcgatactgatga

SEQ ID NO: 293762 - DNA, 25 bp, probe
tttgtgtccagctcagtatctgcaa

SEQ ID NO: 293763 - DNA, 25 bp, probe
tttgttctcatctgctgttctgata

SEQ ID NO: 293764 - DNA, 25 bp, probe
tttggtatatgcttgcttatcttaa

SEQ ID NO: 293765 - DNA, 25 bp, probe
tttggatcaagctgttatgaacacc

SEQ ID NO: 293766 - DNA, 25 bp, probe
tttgaatcacacagttttaacagca

SEQ ID NO: 293767 - DNA, 25 bp, probe
tttcaaagacttcatttaacactga

SEQ ID NO: 293768 - DNA, 25 bp, probe
tttcatccctttgtgtaaacctgtt

SEQ ID NO: 293769 - DNA, 25 bp, probe
ttttccacttttcagaattccatat

SEQ ID NO: 293770 - DNA, 25 bp, probe
tttcgtagtctttgtaaaataatat

SEQ ID NO: 293771 - DNA, 25 bp, probe
tttggtttctcttgtaagacatcag

SEQ ID NO: 293772 - DNA, 25 bp, probe
tttgggaactaactcggtcattgct

SEQ ID NO: 293773 - DNA, 25 bp, probe
tttggtgtggcttaacggtatttca

SEQ ID NO: 293774 - DNA, 25 bp, probe
tttgaagggctataccagttattaa

SEQ ID NO: 293775 - DNA, 25 bp, probe
tttgtaccagctttaccacttttca

SEQ ID NO: 293776 - DNA, 25 bp, probe
ttatggattcctttttaccgtgtca

SEQ ID NO: 293777 - DNA, 25 bp, probe
tttgaattcatttagttactgggca

SEQ ID NO: 293778 - DNA, 25 bp, probe
tttgtttcatattgatgtgtgtcta

SEQ ID NO: 293779 - DNA, 25 bp, probe
tttggtcattcaagttgcgctctgt

SEQ ID NO: 293780 - DNA, 25 bp, probe
tttggataatctagttcatgtgcat

SEQ ID NO: 293781 - DNA, 25 bp, probe
tttgaacatgttattgcagtgattc

SEQ ID NO: 293782 - DNA, 25 bp, probe
tttgaatcttctcttggtgaggcaa

SEQ ID NO: 293783 - DNA, 25 bp, probe
tttgaactttccaaagtgcagccac

SEQ ID NO: 293784 - DNA, 25 bp, probe
tttgcaaatctcacaaagtgcggca

SEQ ID NO: 293785 - DNA, 25 bp, probe
tttggccatctgactaaactgggac

SEQ ID NO: 293786 - DNA, 25 bp, probe
tttggcagcagcacatctaacgagt

SEQ ID NO: 293787 - DNA, 25 bp, probe
tttctgagcatacctggaaaatgct

SEQ ID NO: 293788 - DNA, 25 bp, probe
tttgtagcatcaactagaataatct

SEQ ID NO: 293789 - DNA, 25 bp, probe
tttgtactgcaaagagtgaactata

SEQ ID NO: 293790 - DNA, 25 bp, probe
tttgtatccaaggtgctgaatcttg

SEQ ID NO: 293791 - DNA, 25 bp, probe
tttgtatcacaaatcttaacttgaa

SEQ ID NO: 293792 - DNA, 25 bp, probe
tttgtcacctgaacctaatgtatat

SEQ ID NO: 293793 - DNA, 25 bp, probe
tttgtcacttctgctgtacagatat

SEQ ID NO: 293794 - DNA, 25 bp, probe
tttgctcacagtgcctgtgcaccat

SEQ ID NO: 293795 - DNA, 25 bp, probe
tttgcgcctgtcaagtgcgagccac

SEQ ID NO: 293796 - DNA, 25 bp, probe
tttgcgctgatgttgactgcagggc

SEQ ID NO: 293797 - DNA, 25 bp, probe
tttgtagatgtaaccagtagctgat

SEQ ID NO: 293798 - DNA, 25 bp, probe
tttgatgtattactcatattaccaa

SEQ ID NO: 293799 - DNA, 25 bp, probe
ttctggcttctaccatgaaatcctg

SEQ ID NO: 293800 - DNA, 25 bp, probe
tttgtgtcctaaatgaacttcatga

SEQ ID NO: 293801 - DNA, 25 bp, probe
tttgtgatccttccgaagtcctgaa

SEQ ID NO: 293802 - DNA, 25 bp, probe
tttgattccctgggatagtggcttc

SEQ ID NO: 293803 - DNA, 25 bp, probe
tttgatgtctgcagaagaatgtgtc

SEQ ID NO: 293804 - DNA, 25 bp, probe
tttgttcatgtcagtgagagcttcc

SEQ ID NO: 293805 - DNA, 25 bp, probe
tttgtttgttcagtggagactccct

SEQ ID NO: 293806 - DNA, 25 bp, probe
tttgtttattcatttagaccctgca

SEQ ID NO: 293807 - DNA, 25 bp, probe
tttggtttcagcattagtacctaca

SEQ ID NO: 293808 - DNA, 25 bp, probe
ttagttcttcagcctctaaacctac

SEQ ID NO: 293809 - DNA, 25 bp, probe
ttagttcttcagcctctaaacctac

SEQ ID NO: 293810 - DNA, 25 bp, probe
tttgtctcttcaccgtgttaacata

SEQ ID NO: 293811 - DNA, 25 bp, probe
tttgcttcttgctgggggaccaggg

SEQ ID NO: 293812 - DNA, 25 bp, probe
tttgtatatggtgtgaggtgggagg

SEQ ID NO: 293813 - DNA, 25 bp, probe
tttgcaaaggacctcaggggacagg

SEQ ID NO: 293814 - DNA, 25 bp, probe
tttgcaaaggacctcaggggacagg

SEQ ID NO: 293815 - DNA, 25 bp, probe
tttatggaggaagcatggaagaaat

SEQ ID NO: 293816 - DNA, 25 bp, probe
tttcttgggaatgtgtgccggaata

SEQ ID NO: 293817 - DNA, 25 bp, probe
tttgattacaaatgtgtccatggaa

SEQ ID NO: 293818 - DNA, 25 bp, probe
tttgcttaaattcatgctgttctaa

SEQ ID NO: 293819 - DNA, 25 bp, probe
tttgacataaagcgcatcttctcca

SEQ ID NO: 293820 - DNA, 25 bp, probe
tttgacaaaatgactggctcctgac

SEQ ID NO: 293821 - DNA, 25 bp, probe
tttgaaatagtgaggaactgaccat

SEQ ID NO: 293822 - DNA, 25 bp, probe
tttgacgaagtgagtcccacacctc

SEQ ID NO: 293823 - DNA, 25 bp, probe
tttgagtatccgattcgccatcacc

SEQ ID NO: 293824 - DNA, 25 bp, probe
tttgagtatccgattcgccatcacc

SEQ ID NO: 293825 - DNA, 25 bp, probe
tttgttgatcccatttgacattcac

SEQ ID NO: 293826 - DNA, 25 bp, probe
tttgatcattcccttttccatatag

SEQ ID NO: 293827 - DNA, 25 bp, probe
tttgtgatacgcctaagtcctatga

SEQ ID NO: 293828 - DNA, 25 bp, probe
tttgtgatctacttgaagtcctgaa

SEQ ID NO: 293829 - DNA, 25 bp, probe
tttggcatcttctggctgtccaaga

SEQ ID NO: 293830 - DNA, 25 bp, probe
tttggcatcttctggctgtccaaga

SEQ ID NO: 293831 - DNA, 25 bp, probe
tttgcacatttctaggtacatcaat

SEQ ID NO: 293832 - DNA, 25 bp, probe
tttgcacatttctaggtacatcaat

SEQ ID NO: 293833 - DNA, 25 bp, probe
tttgctgcttgctgacgtaagcaat

SEQ ID NO: 293834 - DNA, 25 bp, probe
tttgctgcttgctgacgtaagcaat

SEQ ID NO: 293835 - DNA, 25 bp, probe
tttgccgatgcatactattactgat

SEQ ID NO: 293836 - DNA, 25 bp, probe
tttgatcgatgctgctccagtaact

SEQ ID NO: 293837 - DNA, 25 bp, probe
tttgtccatcaacttcaggaatatg

SEQ ID NO: 293838 - DNA, 25 bp, probe
tttgtgtcaatacccgaaatgatgt

SEQ ID NO: 293839 - DNA, 25 bp, probe
ttttgtctgaaggggaaaggcattc

SEQ ID NO: 293840 - DNA, 25 bp, probe
tttgtggataacgggaaagccagcc

SEQ ID NO: 293841 - DNA, 25 bp, probe
tttctggtgaccggataaagcaagt

SEQ ID NO: 293842 - DNA, 25 bp, probe
tttctggtactctgtgaaagaagag

SEQ ID NO: 293843 - DNA, 25 bp, probe
tttgcccacacttgggagcaaaaga

SEQ ID NO: 293844 - DNA, 25 bp, probe
tttgcactacctgtggagaaaaggg

SEQ ID NO: 293845 - DNA, 25 bp, probe
tttgcagaacttgtggaaaaactag

SEQ ID NO: 293846 - DNA, 25 bp, probe
tttgcagaaatgtttcgtagaaagt

SEQ ID NO: 293847 - DNA, 25 bp, probe
tttgcatcaaaacttaatcagaaaa

SEQ ID NO: 293848 - DNA, 25 bp, probe
tttgtcacacaaccacagcaaaaaa

SEQ ID NO: 293849 - DNA, 25 bp, probe
tttgtcaaagtgtcctcaccaaagg

SEQ ID NO: 293850 - DNA, 25 bp, probe
tttgcacaaagttccctctgtacag

SEQ ID NO: 293851 - DNA, 25 bp, probe
tttggagaggtttgcgcctgtcaag

SEQ ID NO: 293852 - DNA, 25 bp, probe
tttgggggtgctaatccaggacagc

SEQ ID NO: 293853 - DNA, 25 bp, probe
ttagctgggcctgttccatggcata

SEQ ID NO: 293854 - DNA, 25 bp, probe
tttctggatccagacccaggcagcg

SEQ ID NO: 293855 - DNA, 25 bp, probe
tttctggcaaacgcagcctgaggct

SEQ ID NO: 293856 - DNA, 25 bp, probe
tttctggcaaaatggcactgaatca

SEQ ID NO: 293857 - DNA, 25 bp, probe
tttggaaacaacagcctagatcact

SEQ ID NO: 293858 - DNA, 25 bp, probe
tttggaaacaacagcctagatcact

SEQ ID NO: 293859 - DNA, 25 bp, probe
tttgagaaactcttccctgatgtcc

SEQ ID NO: 293860 - DNA, 25 bp, probe
tttgagaaactcttccctgatgtcc

SEQ ID NO: 293861 - DNA, 25 bp, probe
tttgaatgacagtctgtccctcttc

SEQ ID NO: 293862 - DNA, 25 bp, probe
tttgacagaagcggaactctcttct

SEQ ID NO: 293863 - DNA, 25 bp, probe
tttgacaaattgcacagagctcttt

SEQ ID NO: 293864 - DNA, 25 bp, probe
tttgccatctatagaaagacctcag

SEQ ID NO: 293865 - DNA, 25 bp, probe
tttccatttaacaaaccccagtgat

SEQ ID NO: 293866 - DNA, 25 bp, probe
tttgactttacagcagagacttcag

SEQ ID NO: 293867 - DNA, 25 bp, probe
tttgactttacagcagagacttcag

SEQ ID NO: 293868 - DNA, 25 bp, probe
tttcatctcctgtcccaggattagc

SEQ ID NO: 293869 - DNA, 25 bp, probe
tttgcttactgatacatggcatgta

SEQ ID NO: 293870 - DNA, 25 bp, probe
tttgcttactgatacatggcatgta

SEQ ID NO: 293871 - DNA, 25 bp, probe
tttgctgttcgacaagagcttgaat

SEQ ID NO: 293872 - DNA, 25 bp, probe
tttgcattcttacattagttaagct

SEQ ID NO: 293873 - DNA, 25 bp, probe
tttgcatccctcgtttaattaaatt

SEQ ID NO: 293874 - DNA, 25 bp, probe
tttccctcccgtgaatgtgaagttc

SEQ ID NO: 293875 - DNA, 25 bp, probe
tttccctctgccacagttatcaaga

SEQ ID NO: 293876 - DNA, 25 bp, probe
tttcgcccagtttcatggctaaagt

SEQ ID NO: 293877 - DNA, 25 bp, probe
tttcgcccagtttcatggctaaagt

SEQ ID NO: 293878 - DNA, 25 bp, probe
tttgcagcctgcccttaggcattaa

SEQ ID NO: 293879 - DNA, 25 bp, probe
tttccctgcgtctcagacatgttga

SEQ ID NO: 293880 - DNA, 25 bp, probe
tttccctgcgtctcagacatgttga

SEQ ID NO: 293881 - DNA, 25 bp, probe
tttcccacctaaaaatgtctgaatg

SEQ ID NO: 293882 - DNA, 25 bp, probe
tttacccactggatattgtccgaaa

SEQ ID NO: 293883 - DNA, 25 bp, probe
tttgacccagcactttgttgtggcg

SEQ ID NO: 293884 - DNA, 25 bp, probe
tttcacacgactttcgtggggcccg

SEQ ID NO: 293885 - DNA, 25 bp, probe
tttacagggtaacttgggtccacag

SEQ ID NO: 293886 - DNA, 25 bp, probe
tttcaagggagatgtgtggcttcca

SEQ ID NO: 293887 - DNA, 25 bp, probe
tttctagggtgtagctgggtacata

SEQ ID NO: 293888 - DNA, 25 bp, probe
tttgtggggtcttctgtgagctaca

SEQ ID NO: 293889 - DNA, 25 bp, probe
tttgtggggccagtctgatcacgat

SEQ ID NO: 293890 - DNA, 25 bp, probe
tttgtggggccagtctgatcacgat

SEQ ID NO: 293891 - DNA, 25 bp, probe
tttgtagttgcgacttcttcgatag

SEQ ID NO: 293892 - DNA, 25 bp, probe
tttgtgggtcagtctgtcttcccag

SEQ ID NO: 293893 - DNA, 25 bp, probe
tttgctggttccagtttgcccaatg

SEQ ID NO: 293894 - DNA, 25 bp, probe
tttgctggttccagtttgcccaatg

SEQ ID NO: 293895 - DNA, 25 bp, probe
tttgttgttttcattgctgcaccaa

SEQ ID NO: 293896 - DNA, 25 bp, probe
tttctggcttgtcattctgtacact

SEQ ID NO: 293897 - DNA, 25 bp, probe
tttgaggacgtattctctgaccgct

SEQ ID NO: 293898 - DNA, 25 bp, probe
tttgtggagcgtgacattctcacct

SEQ ID NO: 293899 - DNA, 25 bp, probe
tttgacgtggtggtcatcctcacct

SEQ ID NO: 293900 - DNA, 25 bp, probe
tttgactgtgagaactcatcgaaac

SEQ ID NO: 293901 - DNA, 25 bp, probe
tttgtcgctgcctgtatctgaaaca

SEQ ID NO: 293902 - DNA, 25 bp, probe
tttgctggatgtttggtctgaaaga

SEQ ID NO: 293903 - DNA, 25 bp, probe
tttgcctgaattacgagcagaaaga

SEQ ID NO: 293904 - DNA, 25 bp, probe
tttccaaattccacaataagcaata

SEQ ID NO: 293905 - DNA, 25 bp, probe
tttcccagctgtgtaaaaacaataa

SEQ ID NO: 293906 - DNA, 25 bp, probe
ttctccgcgttcatcaagaacccgg

SEQ ID NO: 293907 - DNA, 25 bp, probe
tttccaaggtgcacattttccacgg

SEQ ID NO: 293908 - DNA, 25 bp, probe
tttgcattaggtgagctttatcctc

SEQ ID NO: 293909 - DNA, 25 bp, probe
tttgttcatttccaattgattctct

SEQ ID NO: 293910 - DNA, 25 bp, probe
tttgttattgtgtattatgttgttc

SEQ ID NO: 293911 - DNA, 25 bp, probe
tttgtgtataatgtgctttatttgc

SEQ ID NO: 293912 - DNA, 25 bp, probe
tttgggatactgcttattttatgat

SEQ ID NO: 293913 - DNA, 25 bp, probe
tttgggatgattgctcgattgtttg

SEQ ID NO: 293914 - DNA, 25 bp, probe
tttgggatgattgctcgattgtttg

SEQ ID NO: 293915 - DNA, 25 bp, probe
tttaggaattcctctgttttatgga

SEQ ID NO: 293916 - DNA, 25 bp, probe
tttactgaagtatccagttcttagt

SEQ ID NO: 293917 - DNA, 25 bp, probe
tttactgtggtctctaagtttggta

SEQ ID NO: 293918 - DNA, 25 bp, probe
tttccagcggtccacattagagttg

SEQ ID NO: 293919 - DNA, 25 bp, probe
tttccgggacgagtttgatctggcc

SEQ ID NO: 293920 - DNA, 25 bp, probe
ttttggggttgtgttgtcacccaag

SEQ ID NO: 293921 - DNA, 25 bp, probe
tttaaggagcttgtttacccaccag

SEQ ID NO: 293922 - DNA, 25 bp, probe
tttgaagggttctcgtatgtcaacc

SEQ ID NO: 293923 - DNA, 25 bp, probe
tttgaaggttttgagtatatcaatc

SEQ ID NO: 293924 - DNA, 25 bp, probe
tttgtatggctttttggttatgtat

SEQ ID NO: 293925 - DNA, 25 bp, probe
tttgtcttggtcttagtgtttgcta

SEQ ID NO: 293926 - DNA, 25 bp, probe
tttgtgtctgtgttctactgtttcc

SEQ ID NO: 293927 - DNA, 25 bp, probe
tttctgtcagtgccttatcttatga

SEQ ID NO: 293928 - DNA, 25 bp, probe
tttctgtcagtgccttatcttatga

SEQ ID NO: 293929 - DNA, 25 bp, probe
tttctgttgctgccatttccagtta

SEQ ID NO: 293930 - DNA, 25 bp, probe
tttgggctgcatgctattccatttt

SEQ ID NO: 293931 - DNA, 25 bp, probe
tttgctggctgcacaacagacattt

SEQ ID NO: 293932 - DNA, 25 bp, probe
tttgttcatgctccaaagaacattt

SEQ ID NO: 293933 - DNA, 25 bp, probe
tttgtcactctagaagagttcttca

SEQ ID NO: 293934 - DNA, 25 bp, probe
tttgtactctataatgtgaactttc

SEQ ID NO: 293935 - DNA, 25 bp, probe
tttgtatgttagcatcgactctttc

SEQ ID NO: 293936 - DNA, 25 bp, probe
ttttatgtaaggggtttcctgcaga

SEQ ID NO: 293937 - DNA, 25 bp, probe
ttttttaaggcatcattttcgaggg

SEQ ID NO: 293938 - DNA, 25 bp, probe
tttagtcaccagaaactttttcagg

SEQ ID NO: 293939 - DNA, 25 bp, probe
tttcctacagaacactttttctgca

SEQ ID NO: 293940 - DNA, 25 bp, probe
tttctctgagcacaaagttttaggc

SEQ ID NO: 293941 - DNA, 25 bp, probe
tttctctgagcacaaagttttaggc

SEQ ID NO: 293942 - DNA, 25 bp, probe
tttccaggcatagcagttctttagc

SEQ ID NO: 293943 - DNA, 25 bp, probe
tttgccagagaatggtctttaccta

SEQ ID NO: 293944 - DNA, 25 bp, probe
tttgccaagcacatgttctttctgt

SEQ ID NO: 293945 - DNA, 25 bp, probe
tttgtcaagctcatttcctggtatg

SEQ ID NO: 293946 - DNA, 25 bp, probe
tttgtcaacttttgtcttccattgt

SEQ ID NO: 293947 - DNA, 25 bp, probe
tttgtcaacttttgtcttccattgt

SEQ ID NO: 293948 - DNA, 25 bp, probe
tttgtctttctttgtcattcagttc

SEQ ID NO: 293949 - DNA, 25 bp, probe
tttgtctctttttgtatatcatcta

SEQ ID NO: 293950 - DNA, 25 bp, probe
tttcctctcttaattttgttcaccg

SEQ ID NO: 293951 - DNA, 25 bp, probe
tttcctctcttaattttgttcaccg

SEQ ID NO: 293952 - DNA, 25 bp, probe
tttgttctttaagtcctgtgtcacc

SEQ ID NO: 293953 - DNA, 25 bp, probe
ttgttttgatgtcaccttggtaggc

SEQ ID NO: 293954 - DNA, 25 bp, probe
tttcttctagtggaccttgggaggc

SEQ ID NO: 293955 - DNA, 25 bp, probe
tttgccctaatcttcctgctgggca

SEQ ID NO: 293956 - DNA, 25 bp, probe
tttgtcgttgccttcacagtggaca

SEQ ID NO: 293957 - DNA, 25 bp, probe
tttgatcgactcattgctcagggat

SEQ ID NO: 293958 - DNA, 25 bp, probe
tttgtgctactcatgttgctggcca

SEQ ID NO: 293959 - DNA, 25 bp, probe
tttgtgctactcatgttgctggcca

SEQ ID NO: 293960 - DNA, 25 bp, probe
tttgttgcagctgctgttgctgccc

SEQ ID NO: 293961 - DNA, 25 bp, probe
tttgtggcagctgctcttgctgccc

SEQ ID NO: 293962 - DNA, 25 bp, probe
tttgacctgctggtcatcatgttcc

SEQ ID NO: 293963 - DNA, 25 bp, probe
tttgcatgactgtggcctgttgctc

SEQ ID NO: 293964 - DNA, 25 bp, probe
tttgcatgactgtggcctgttgctc

SEQ ID NO: 293965 - DNA, 25 bp, probe
tttgaggcgaaggcgtctgtctctt

SEQ ID NO: 293966 - DNA, 25 bp, probe
tttgagtttgaggcgcatcggccct

SEQ ID NO: 293967 - DNA, 25 bp, probe
tttgagtttgaggcgcatcggccct

SEQ ID NO: 293968 - DNA, 25 bp, probe
tttgagtttatggacactgacctga

SEQ ID NO: 293969 - DNA, 25 bp, probe
ttctggctttgggaactaactcggt

SEQ ID NO: 293970 - DNA, 25 bp, probe
tttgtgctcttgcaagactatacaa

SEQ ID NO: 293971 - DNA, 25 bp, probe
tttgtgtttctattgacttcaatga

SEQ ID NO: 293972 - DNA, 25 bp, probe
tttgttggtgctttgcattttgata

SEQ ID NO: 293973 - DNA, 25 bp, probe
ttttatggtgtctcatagccaatcc

SEQ ID NO: 293974 - DNA, 25 bp, probe
tttgtaactgtttcatagaagagcc

SEQ ID NO: 293975 - DNA, 25 bp, probe
tttgtaacctgattgtggaaagcac

SEQ ID NO: 293976 - DNA, 25 bp, probe
tttgtaacactcttgtgaccgtgcc

SEQ ID NO: 293977 - DNA, 25 bp, probe
tttgaaagcacttaagcactcctcc

SEQ ID NO: 293978 - DNA, 25 bp, probe
tttgcaacatcctgcaacaccatcc

SEQ ID NO: 293979 - DNA, 25 bp, probe
tttgagaaccggacagactgctggg

SEQ ID NO: 293980 - DNA, 25 bp, probe
tttgaaacctgtcagaactgcagcc

SEQ ID NO: 293981 - DNA, 25 bp, probe
tttgaaacgcctacaaacctccatg

SEQ ID NO: 293982 - DNA, 25 bp, probe
tttaacaccaatgctgaaccccatg

SEQ ID NO: 293983 - DNA, 25 bp, probe
tttcaccaaccagttatactccttg

SEQ ID NO: 293984 - DNA, 25 bp, probe
tttccccagcccaatgattgtttac

SEQ ID NO: 293985 - DNA, 25 bp, probe
tttctccccaacataattatttcat

SEQ ID NO: 293986 - DNA, 25 bp, probe
tttccaccacaaaaaataatctgag

SEQ ID NO: 293987 - DNA, 25 bp, probe
tttccaccacaaaaaataatctgag

SEQ ID NO: 293988 - DNA, 25 bp, probe
tttgccaaccaataaacaactgatt

SEQ ID NO: 293989 - DNA, 25 bp, probe
tttgtgaccgatatcaaaaactttg

SEQ ID NO: 293990 - DNA, 25 bp, probe
tttgaggcctacgcgaaaatctgtg

SEQ ID NO: 293991 - DNA, 25 bp, probe
tttgagccttttgcagacaagtttc

SEQ ID NO: 293992 - DNA, 25 bp, probe
tttgttttttccttctgagtttgct

SEQ ID NO: 293993 - DNA, 25 bp, probe
tttttgttttcctctcagactttat

SEQ ID NO: 293994 - DNA, 25 bp, probe
tttgtttctttctgtccatacttaa

SEQ ID NO: 293995 - DNA, 25 bp, probe
tttgttttctattcagtccatagtt

SEQ ID NO: 293996 - DNA, 25 bp, probe
tttgattattaaatagtcactagta

SEQ ID NO: 293997 - DNA, 25 bp, probe
tttgttatatacttgttttacatga

SEQ ID NO: 293998 - DNA, 25 bp, probe
tttgttgtatacttccttatgcttc

SEQ ID NO: 293999 - DNA, 25 bp, probe
tttgtattgtactgccattcctact

SEQ ID NO: 294000 - DNA, 25 bp, probe
ttttgttgagtctgccattcgtagc

SEQ ID NO: 294001 - DNA, 25 bp, probe
tttgtttgaaccacattctggggaa

SEQ ID NO: 294002 - DNA, 25 bp, probe
tttctctaccccattttgtggtaat

SEQ ID NO: 294003 - DNA, 25 bp, probe
tttcctaatcccagttggtggctgt

SEQ ID NO: 294004 - DNA, 25 bp, probe
tttcgttgtgctcctaatgggtcgc

SEQ ID NO: 294005 - DNA, 25 bp, probe
tttctggtcactccccaggattatg

SEQ ID NO: 294006 - DNA, 25 bp, probe
tttcggctgatctcccagatgaact

SEQ ID NO: 294007 - DNA, 25 bp, probe
tttgccagattcatccctaagcact

SEQ ID NO: 294008 - DNA, 25 bp, probe
tttgctcgattttataaattgcact

SEQ ID NO: 294009 - DNA, 25 bp, probe
tttctgagacttggattaattcatg

SEQ ID NO: 294010 - DNA, 25 bp, probe
tttctgaggctcgatctgtacttca

SEQ ID NO: 294011 - DNA, 25 bp, probe
tttctgaggcttttgtactttagta

SEQ ID NO: 294012 - DNA, 25 bp, probe
tttcctgccgattgttgacttgcta

SEQ ID NO: 294013 - DNA, 25 bp, probe
tttcctgccgattgttgacttgcta

SEQ ID NO: 294014 - DNA, 25 bp, probe
tttcctctccaattgggttgtgaaa

SEQ ID NO: 294015 - DNA, 25 bp, probe
tttccagtcacatttggggcattta

SEQ ID NO: 294016 - DNA, 25 bp, probe
tttccagtcacatttggggcattta

SEQ ID NO: 294017 - DNA, 25 bp, probe
tttccagaccaaacagaggcttctt

SEQ ID NO: 294018 - DNA, 25 bp, probe
tttctcaaccaggggaccctgctct

SEQ ID NO: 294019 - DNA, 25 bp, probe
tttctcagacccggaatccagtggg

SEQ ID NO: 294020 - DNA, 25 bp, probe
tttgctcagtcttctgaactccagg

SEQ ID NO: 294021 - DNA, 25 bp, probe
tttatgccctttggactgtcaggtc

SEQ ID NO: 294022 - DNA, 25 bp, probe
ttttcaccttaccactgacaggtcg

SEQ ID NO: 294023 - DNA, 25 bp, probe
tttctgactctaagctcctgagcgg

SEQ ID NO: 294024 - DNA, 25 bp, probe
tttcgatcattcaatgcatagtgca

SEQ ID NO: 294025 - DNA, 25 bp, probe
tttagctcatgactctgcaaggcag

SEQ ID NO: 294026 - DNA, 25 bp, probe
tttctgcatcagctgctgaaacaac

SEQ ID NO: 294027 - DNA, 25 bp, probe
tttgacatgagccctgaaaattccc

SEQ ID NO: 294028 - DNA, 25 bp, probe
tttgcacagagacctgaaaccacag

SEQ ID NO: 294029 - DNA, 25 bp, probe
tttgcacatgaccctgtgaacctgc

SEQ ID NO: 294030 - DNA, 25 bp, probe
tttgcacatgaccctgtgaacctgc

SEQ ID NO: 294031 - DNA, 25 bp, probe
tttgcatgcatgggtttgaattctt

SEQ ID NO: 294032 - DNA, 25 bp, probe
tttgtgctggcctttgagttcatgc

SEQ ID NO: 294033 - DNA, 25 bp, probe
tttgaagcaactcatggttcatgct

SEQ ID NO: 294034 - DNA, 25 bp, probe
tttgaagcaactcatcgattgattt

SEQ ID NO: 294035 - DNA, 25 bp, probe
tttgaaatcctattcaagtattttt

SEQ ID NO: 294036 - DNA, 25 bp, probe
tttgccgatttttgaatgtgatttt

SEQ ID NO: 294037 - DNA, 25 bp, probe
tttaccatgttttccagtctgttta

SEQ ID NO: 294038 - DNA, 25 bp, probe
ttcaacgagaatttccgccgtggtt

SEQ ID NO: 294039 - DNA, 25 bp, probe
ttcaaggagaagcccctacgtcttc

SEQ ID NO: 294040 - DNA, 25 bp, probe
ttctaaaggcacacctcggtcttac

SEQ ID NO: 294041 - DNA, 25 bp, probe
tttgcaagggccaaactctggtttt

SEQ ID NO: 294042 - DNA, 25 bp, probe
tttgaggtagtccagaccttttctt

SEQ ID NO: 294043 - DNA, 25 bp, probe
tttagattattccaagccttatttt

SEQ ID NO: 294044 - DNA, 25 bp, probe
tttagattattccaagccttatttt

SEQ ID NO: 294045 - DNA, 25 bp, probe
tttgtatcttttcagcacttaattt

SEQ ID NO: 294046 - DNA, 25 bp, probe
tttgtttctttgcaatgcattgtat

SEQ ID NO: 294047 - DNA, 25 bp, probe
tttgattttattcgcaccattgcgg

SEQ ID NO: 294048 - DNA, 25 bp, probe
tttgtttcaatgttcctaatgggtt

SEQ ID NO: 294049 - DNA, 25 bp, probe
tttgtcttccttaccaagtgaactc

SEQ ID NO: 294050 - DNA, 25 bp, probe
tttgtcttcctcactagtgtaaaca

SEQ ID NO: 294051 - DNA, 25 bp, probe
tttgtttcaccaaccagttatactc

SEQ ID NO: 294052 - DNA, 25 bp, probe
tttgtttcatactgccaataaactc

SEQ ID NO: 294053 - DNA, 25 bp, probe
tttgtttgtacggaccataaatata

SEQ ID NO: 294054 - DNA, 25 bp, probe
tttttggtgccaaagcaaataaata

SEQ ID NO: 294055 - DNA, 25 bp, probe
tttagggagcacaaacaagaagaga

SEQ ID NO: 294056 - DNA, 25 bp, probe
tttgcgtagcagccctcacaaaaag

SEQ ID NO: 294057 - DNA, 25 bp, probe
tttgcttacagtgcatcacaactga

SEQ ID NO: 294058 - DNA, 25 bp, probe
tttcccaatgcagatcacatagcat

SEQ ID NO: 294059 - DNA, 25 bp, probe
tttgcccagacagtcatgactagca

SEQ ID NO: 294060 - DNA, 25 bp, probe
tttgcacgaacactagcagctcctg

SEQ ID NO: 294061 - DNA, 25 bp, probe
tttgccatcaaaatgaggcctgtga

SEQ ID NO: 294062 - DNA, 25 bp, probe
tttccatactattgactgggtgcaa

SEQ ID NO: 294063 - DNA, 25 bp, probe
tttcctgcctgtcgacatggttaaa

SEQ ID NO: 294064 - DNA, 25 bp, probe
tttactgcctgtagcaatggccaga

SEQ ID NO: 294065 - DNA, 25 bp, probe
tttcatcatccgagcattgtctgca

SEQ ID NO: 294066 - DNA, 25 bp, probe
tttgctcatcttaccatattgcata

SEQ ID NO: 294067 - DNA, 25 bp, probe
ttatctcatatggagttatcactca

SEQ ID NO: 294068 - DNA, 25 bp, probe
tttcctgatgccctgacatcatcat

SEQ ID NO: 294069 - DNA, 25 bp, probe
tttcctgatgccctgacatcatcat

SEQ ID NO: 294070 - DNA, 25 bp, probe
tttgcgtgaggcatgcactctcagg

SEQ ID NO: 294071 - DNA, 25 bp, probe
tttgctgtattggatgccatcatcg

SEQ ID NO: 294072 - DNA, 25 bp, probe
tttgctgtattggatgccatcatcg

SEQ ID NO: 294073 - DNA, 25 bp, probe
tttgttgatctgttcaccactcatt

SEQ ID NO: 294074 - DNA, 25 bp, probe
tttgttgttgttggcaagctgcagg

SEQ ID NO: 294075 - DNA, 25 bp, probe
tttgcggttgtgatgcatagtggca

SEQ ID NO: 294076 - DNA, 25 bp, probe
tttgctggtgtgtacttagctcaga

SEQ ID NO: 294077 - DNA, 25 bp, probe
tttgctcaggtgacctgttccagcc

SEQ ID NO: 294078 - DNA, 25 bp, probe
tttcatcggtgcctggtactctggc

SEQ ID NO: 294079 - DNA, 25 bp, probe
tttcatgcagtgccctgggagtctt

SEQ ID NO: 294080 - DNA, 25 bp, probe
tttccatctgtcctgagcaagtcat

SEQ ID NO: 294081 - DNA, 25 bp, probe
tttgcctttctgaataaatcttaga

SEQ ID NO: 294082 - DNA, 25 bp, probe
tttgccttgggattaacaattgcag

SEQ ID NO: 294083 - DNA, 25 bp, probe
tttactaggagattcagcaaaacag

SEQ ID NO: 294084 - DNA, 25 bp, probe
tttatctgggtgtctcgcaccataa

SEQ ID NO: 294085 - DNA, 25 bp, probe
tttactggcaaggtcaggccttcaa

SEQ ID NO: 294086 - DNA, 25 bp, probe
tttactggcaaggtcaggccttcaa

SEQ ID NO: 294087 - DNA, 25 bp, probe
tttcgtggaagttcagatgttgatc

SEQ ID NO: 294088 - DNA, 25 bp, probe
tttcctgagcaagtgacaatctaac

SEQ ID NO: 294089 - DNA, 25 bp, probe
tttccatgtgaaagatctcattaag

SEQ ID NO: 294090 - DNA, 25 bp, probe
tttgccagtgactagtccatgtctt

SEQ ID NO: 294091 - DNA, 25 bp, probe
tttgtcactatctgtcaagactgat

SEQ ID NO: 294092 - DNA, 25 bp, probe
ttcagtccttcttggaagactactt

SEQ ID NO: 294093 - DNA, 25 bp, probe
ttcagtccttcttggaagactactt

SEQ ID NO: 294094 - DNA, 25 bp, probe
ttcagtcttcaaagtggaaatacct

SEQ ID NO: 294095 - DNA, 25 bp, probe
ttcctcgtgctaaaggacaaacctc

SEQ ID NO: 294096 - DNA, 25 bp, probe
tttccccttggaaacagcaatccca

SEQ ID NO: 294097 - DNA, 25 bp, probe
ttccccttcaggataagaacttcca

SEQ ID NO: 294098 - DNA, 25 bp, probe
ttcatccctttgtgtaaacctgtta

SEQ ID NO: 294099 - DNA, 25 bp, probe
tttgcccttgctttctgaaaatcag

SEQ ID NO: 294100 - DNA, 25 bp, probe
tttataattgcttccaaacagctgg

SEQ ID NO: 294101 - DNA, 25 bp, probe
tttgtattctggaccacttactggt

SEQ ID NO: 294102 - DNA, 25 bp, probe
tttgtattctggaccacttactggt

SEQ ID NO: 294103 - DNA, 25 bp, probe
tttcttgtttgagctgttactacat

SEQ ID NO: 294104 - DNA, 25 bp, probe
tttgctttttgattcttgtagctac

SEQ ID NO: 294105 - DNA, 25 bp, probe
tttgattctttgactggtgaatgcg

SEQ ID NO: 294106 - DNA, 25 bp, probe
tttgttttcatagtgggaatcagga

SEQ ID NO: 294107 - DNA, 25 bp, probe
ttttttgcccctcggaagcatgggg

SEQ ID NO: 294108 - DNA, 25 bp, probe
tttgatttccccatcgagactgtgg

SEQ ID NO: 294109 - DNA, 25 bp, probe
tttgatgattccactaaagaagttg

SEQ ID NO: 294110 - DNA, 25 bp, probe
tttgatgatgcttcccaagaaatag

SEQ ID NO: 294111 - DNA, 25 bp, probe
tttgatgttagcgtataaattagtg

SEQ ID NO: 294112 - DNA, 25 bp, probe
tttgcagattgggtaacacaggaac

SEQ ID NO: 294113 - DNA, 25 bp, probe
tttgccattagatctagacaagaac

SEQ ID NO: 294114 - DNA, 25 bp, probe
ttcatctccttggacaaagaagaac

SEQ ID NO: 294115 - DNA, 25 bp, probe
tttccctgatggacaccagcggcaa

SEQ ID NO: 294116 - DNA, 25 bp, probe
tttccctgatggacaccagcggcaa

SEQ ID NO: 294117 - DNA, 25 bp, probe
tttccctggagccccagaagaaacg

SEQ ID NO: 294118 - DNA, 25 bp, probe
tttcctcatggacgctcgcgaggag

SEQ ID NO: 294119 - DNA, 25 bp, probe
tttcctcatggacgctcgcgaggag

SEQ ID NO: 294120 - DNA, 25 bp, probe
ttacctataaccggacatatgagtc

SEQ ID NO: 294121 - DNA, 25 bp, probe
tttcctcatcccggaagcatgacag

SEQ ID NO: 294122 - DNA, 25 bp, probe
tttgcagcttatgtaatagcagata

SEQ ID NO: 294123 - DNA, 25 bp, probe
tttcaggatgggacagtatcagatc

SEQ ID NO: 294124 - DNA, 25 bp, probe
tttcgcgatggacagactcacaacc

SEQ ID NO: 294125 - DNA, 25 bp, probe
tttccctgcttctagcccagaagcg

SEQ ID NO: 294126 - DNA, 25 bp, probe
tttccctgcttctagcccagaagcg

SEQ ID NO: 294127 - DNA, 25 bp, probe
tttcatttcctctgggcaggactct

SEQ ID NO: 294128 - DNA, 25 bp, probe
tttcatttcctctgggcaggactct

SEQ ID NO: 294129 - DNA, 25 bp, probe
tttctactcctctgacgaatgggta

SEQ ID NO: 294130 - DNA, 25 bp, probe
ttttagcggttatgggatgggtcac

SEQ ID NO: 294131 - DNA, 25 bp, probe
tttccagccttctttgagttgggta

SEQ ID NO: 294132 - DNA, 25 bp, probe
tttccatccaccctagaggctgggt

SEQ ID NO: 294133 - DNA, 25 bp, probe
tttcctgaagagcgatgaaggtggc

SEQ ID NO: 294134 - DNA, 25 bp, probe
tttccgccagaatggcggctgtggc

SEQ ID NO: 294135 - DNA, 25 bp, probe
ttgtaccaaagacagtggtggtccg

SEQ ID NO: 294136 - DNA, 25 bp, probe
ttctaccaccgggaaacggatcacg

SEQ ID NO: 294137 - DNA, 25 bp, probe
tttacacaaagggaagtcgggcatg

SEQ ID NO: 294138 - DNA, 25 bp, probe
tttaaagaaacaggattcagtgtga

SEQ ID NO: 294139 - DNA, 25 bp, probe
ttttacaggtaagtgcaaaggagaa

SEQ ID NO: 294140 - DNA, 25 bp, probe
ttgtatcacaggagggatcgtggaa

SEQ ID NO: 294141 - DNA, 25 bp, probe
tttctcacagtgacaggaaggtatg

SEQ ID NO: 294142 - DNA, 25 bp, probe
tttctcacagtgacaggaaggtatg

SEQ ID NO: 294143 - DNA, 25 bp, probe
ttataacagtgccttaaggtatgat

SEQ ID NO: 294144 - DNA, 25 bp, probe
tttgcaactcatgttatgggttaaa

SEQ ID NO: 294145 - DNA, 25 bp, probe
tttctgattcatgttagactttgaa

SEQ ID NO: 294146 - DNA, 25 bp, probe
tttctatagttttgagagttcgata

SEQ ID NO: 294147 - DNA, 25 bp, probe
tttctcaggtgaaacgactccgttt

SEQ ID NO: 294148 - DNA, 25 bp, probe
tttctcaggtgaaacgactccgttt

SEQ ID NO: 294149 - DNA, 25 bp, probe
tttctaggtgaagcatactccagtg

SEQ ID NO: 294150 - DNA, 25 bp, probe
tttccaggggagaaacctgagtctc

SEQ ID NO: 294151 - DNA, 25 bp, probe
tttgaagggtggcttgccggctatc

SEQ ID NO: 294152 - DNA, 25 bp, probe
tttagctgagctggggttgggtgta

SEQ ID NO: 294153 - DNA, 25 bp, probe
tttgttgacatcttagggctggtgt

SEQ ID NO: 294154 - DNA, 25 bp, probe
tttgcttatatctgaagggaggtgg

SEQ ID NO: 294155 - DNA, 25 bp, probe
tttcttcatctgtccagttggggta

SEQ ID NO: 294156 - DNA, 25 bp, probe
tttcctcttgatttgtctgggttaa

SEQ ID NO: 294157 - DNA, 25 bp, probe
tttcttgaccatttacttggttact

SEQ ID NO: 294158 - DNA, 25 bp, probe
ttattaacctttagtgttactgaat

SEQ ID NO: 294159 - DNA, 25 bp, probe
ttttaacctcctaagtatcaagtat

SEQ ID NO: 294160 - DNA, 25 bp, probe
ttttataaccgctacactacagagt

SEQ ID NO: 294161 - DNA, 25 bp, probe
ttttacaagccgcaaaggcagcagg

SEQ ID NO: 294162 - DNA, 25 bp, probe
tttctagcaaaacaggtggcagcag

SEQ ID NO: 294163 - DNA, 25 bp, probe
tttctagcaaaacaggtggcagcag

SEQ ID NO: 294164 - DNA, 25 bp, probe
tttgtagaagatactagttgaggag

SEQ ID NO: 294165 - DNA, 25 bp, probe
tttccgacagatgtcgtcgggagcc

SEQ ID NO: 294166 - DNA, 25 bp, probe
tttcttgacaatggggtcaggcccc

SEQ ID NO: 294167 - DNA, 25 bp, probe
tttccaggcaatgacgtcgatgacc

SEQ ID NO: 294168 - DNA, 25 bp, probe
tttccataaatggggtcgagaatca

SEQ ID NO: 294169 - DNA, 25 bp, probe
tttccagcaagatgggtcctgactc

SEQ ID NO: 294170 - DNA, 25 bp, probe
tttccagtcaagtggtcagctccag

SEQ ID NO: 294171 - DNA, 25 bp, probe
tttccttgcaggagcgtcagttgcg

SEQ ID NO: 294172 - DNA, 25 bp, probe
tttcctctgggatgctgattgtctc

SEQ ID NO: 294173 - DNA, 25 bp, probe
tttccttgggtgcctttatgcagca

SEQ ID NO: 294174 - DNA, 25 bp, probe
tttgccttgggctgtgtcaacagca

SEQ ID NO: 294175 - DNA, 25 bp, probe
tttgctggggccatggcccacacag

SEQ ID NO: 294176 - DNA, 25 bp, probe
tttgctggggccatggcccacacag

SEQ ID NO: 294177 - DNA, 25 bp, probe
tttgccaaacctttgtaccacagaa

SEQ ID NO: 294178 - DNA, 25 bp, probe
tttgcccagtcgttctggaccaaag

SEQ ID NO: 294179 - DNA, 25 bp, probe
tttccctctcagattgtaccattga

SEQ ID NO: 294180 - DNA, 25 bp, probe
ttttccttcggtttgatgctgacaa

SEQ ID NO: 294181 - DNA, 25 bp, probe
ttttcagttgggatgcgactgacaa

SEQ ID NO: 294182 - DNA, 25 bp, probe
ttttcagttgggatgcgactgacaa

SEQ ID NO: 294183 - DNA, 25 bp, probe
ttttcagctgaggctctgagaactg

SEQ ID NO: 294184 - DNA, 25 bp, probe
ttttcaggaggcctggttggacttg

SEQ ID NO: 294185 - DNA, 25 bp, probe
tttcctgggcagggaggggcagctt

SEQ ID NO: 294186 - DNA, 25 bp, probe
tttccctgatgggttggggcagtta

SEQ ID NO: 294187 - DNA, 25 bp, probe
tttaccctggacctgtgggtgttca

SEQ ID NO: 294188 - DNA, 25 bp, probe
tttcacgcccgggagtggaatgcct

SEQ ID NO: 294189 - DNA, 25 bp, probe
tttgcacaccaaggcggggagtcgg

SEQ ID NO: 294190 - DNA, 25 bp, probe
tttccccaattgcggagcgtctggg

SEQ ID NO: 294191 - DNA, 25 bp, probe
tttcctcacactaagagggcagact

SEQ ID NO: 294192 - DNA, 25 bp, probe
tttcctcacacagaagaggtcagca

SEQ ID NO: 294193 - DNA, 25 bp, probe
tttgttctccacaataggctctcaa

SEQ ID NO: 294194 - DNA, 25 bp, probe
tttgtttctctttgcagagagccaa

SEQ ID NO: 294195 - DNA, 25 bp, probe
tttgtattttcttatgggccagaga

SEQ ID NO: 294196 - DNA, 25 bp, probe
tttgtttacttgttttgcacagacg

SEQ ID NO: 294197 - DNA, 25 bp, probe
ttattttactttctagacctaggct

SEQ ID NO: 294198 - DNA, 25 bp, probe
tttcttctactggcttgtaatttag

SEQ ID NO: 294199 - DNA, 25 bp, probe
tttctgagtgagtcctttttttatg

SEQ ID NO: 294200 - DNA, 25 bp, probe
tttctgagtgagtcctttttttatg

SEQ ID NO: 294201 - DNA, 25 bp, probe
tttcctgtgagggcttggtttcctt

SEQ ID NO: 294202 - DNA, 25 bp, probe
tttgaatgatgagccttcgtgcccc

SEQ ID NO: 294203 - DNA, 25 bp, probe
tttgaatgatgagccttcgtgcccc

SEQ ID NO: 294204 - DNA, 25 bp, probe
ttatgacatggtgccttcagatccc

SEQ ID NO: 294205 - DNA, 25 bp, probe
ttatgacatggtgccttcagatccc

SEQ ID NO: 294206 - DNA, 25 bp, probe
tttgcaatggtgtcaccacggccac

SEQ ID NO: 294207 - DNA, 25 bp, probe
tttgcagcggcctacaaaggcacgc

SEQ ID NO: 294208 - DNA, 25 bp, probe
tttgcagttgacttcaagacgctgg

SEQ ID NO: 294209 - DNA, 25 bp, probe
tttgagttaacttcagtcctttctt

SEQ ID NO: 294210 - DNA, 25 bp, probe
tttgatttaaccaccctgattcatc

SEQ ID NO: 294211 - DNA, 25 bp, probe
tttcctttaccaaggccagtcatcc

SEQ ID NO: 294212 - DNA, 25 bp, probe
tttccagtatacaaaggactgcctc

SEQ ID NO: 294213 - DNA, 25 bp, probe
tttctggatgcttgccaaggcactc

SEQ ID NO: 294214 - DNA, 25 bp, probe
tttctgtgtgctgcacggtgcaggc

SEQ ID NO: 294215 - DNA, 25 bp, probe
tttgaagctatggcaagggcagaca

SEQ ID NO: 294216 - DNA, 25 bp, probe
tttgaaatatgctaagaatgagaca

SEQ ID NO: 294217 - DNA, 25 bp, probe
tttcctctcatgtctagaatgggca

SEQ ID NO: 294218 - DNA, 25 bp, probe
tttccatgatcatctacacagtgac

SEQ ID NO: 294219 - DNA, 25 bp, probe
tttccatacatgtttttgtactttt

SEQ ID NO: 294220 - DNA, 25 bp, probe
tttccaaaacgtttccagcatcttt

SEQ ID NO: 294221 - DNA, 25 bp, probe
tttcatgccaatttgtttccgtcat

SEQ ID NO: 294222 - DNA, 25 bp, probe
ttctaccaatctatatgtctttcgg

SEQ ID NO: 294223 - DNA, 25 bp, probe
tttgaaccattaacatgcatctttg

SEQ ID NO: 294224 - DNA, 25 bp, probe
tttgaaactgtatcacctttgccaa

SEQ ID NO: 294225 - DNA, 25 bp, probe
tttaaactatcatagccctgcttac

SEQ ID NO: 294226 - DNA, 25 bp, probe
tttgacaaaagatacgcccttctcc

SEQ ID NO: 294227 - DNA, 25 bp, probe
tttgacaaaagatacgcccttctcc

SEQ ID NO: 294228 - DNA, 25 bp, probe
tttgaaaaaacgactgcccatcccg

SEQ ID NO: 294229 - DNA, 25 bp, probe
tttgaaaaaacgactgcccatcccg

SEQ ID NO: 294230 - DNA, 25 bp, probe
tttaaaaacatgcagcttccctctc

SEQ ID NO: 294231 - DNA, 25 bp, probe
ttttgcaaaagaagaggtctccctc

SEQ ID NO: 294232 - DNA, 25 bp, probe
ttttgcaaaagaagaggtctccctc

SEQ ID NO: 294233 - DNA, 25 bp, probe
tttgcaaaagaagaggtctccctca

SEQ ID NO: 294234 - DNA, 25 bp, probe
tttttaagtcagtatggtctaacac

SEQ ID NO: 294235 - DNA, 25 bp, probe
tttgattaagtcctatttttcacct

SEQ ID NO: 294236 - DNA, 25 bp, probe
ttataatacgtacaatccttccctc

SEQ ID NO: 294237 - DNA, 25 bp, probe
tttcaaacagaacactcctttcctc

SEQ ID NO: 294238 - DNA, 25 bp, probe
ttttaagtaatcaccactttcttct

SEQ ID NO: 294239 - DNA, 25 bp, probe
ttgggaacctacaccacatttccct

SEQ ID NO: 294240 - DNA, 25 bp, probe
ttaggaaacctcacgactggtcacc

SEQ ID NO: 294241 - DNA, 25 bp, probe
tttgcagaaaccacacacactgttg

SEQ ID NO: 294242 - DNA, 25 bp, probe
tttgctaaacattcactgcacacgt

SEQ ID NO: 294243 - DNA, 25 bp, probe
tttctatcaacttacaaaacttctt

SEQ ID NO: 294244 - DNA, 25 bp, probe
tttctatcaacttacaaaacttctt

SEQ ID NO: 294245 - DNA, 25 bp, probe
tttccatcaggccaaagaatccttc

SEQ ID NO: 294246 - DNA, 25 bp, probe
tttcactaggcatttggcaattctt

SEQ ID NO: 294247 - DNA, 25 bp, probe
tttgcaagatgtttgtggaaatgtt

SEQ ID NO: 294248 - DNA, 25 bp, probe
tttgctcagtgcaaggtggagaagg

SEQ ID NO: 294249 - DNA, 25 bp, probe
tttgccacgctgcgggagaagctgc

SEQ ID NO: 294250 - DNA, 25 bp, probe
tttgccgctgggacaagagacgctg

SEQ ID NO: 294251 - DNA, 25 bp, probe
tttgccgctgggacaagagacgctg

SEQ ID NO: 294252 - DNA, 25 bp, probe
tttcctgggtgacaatgatgctgag

SEQ ID NO: 294253 - DNA, 25 bp, probe
tttccatgggaaattgacatgcaga

SEQ ID NO: 294254 - DNA, 25 bp, probe
tttcgtgccgaaatgagacagaaat

SEQ ID NO: 294255 - DNA, 25 bp, probe
tttgcctccgaagtgaaaaagatgc

SEQ ID NO: 294256 - DNA, 25 bp, probe
tttctcttccagctgctaaaaggcc

SEQ ID NO: 294257 - DNA, 25 bp, probe
tttccctccactctacaaggagctc

SEQ ID NO: 294258 - DNA, 25 bp, probe
tttctcctccgtcctaagagtatca

SEQ ID NO: 294259 - DNA, 25 bp, probe
ttacccccaccactaagagaataca

SEQ ID NO: 294260 - DNA, 25 bp, probe
tttgcccctacgtctgaataaaagc

SEQ ID NO: 294261 - DNA, 25 bp, probe
tttgctcccaatccctatttgagaa

SEQ ID NO: 294262 - DNA, 25 bp, probe
tttgaggccaatgctgctttctggt

SEQ ID NO: 294263 - DNA, 25 bp, probe
tttgagtgccctttgctattctcag

SEQ ID NO: 294264 - DNA, 25 bp, probe
tttgatgtcaccttggtaggctggg

SEQ ID NO: 294265 - DNA, 25 bp, probe
tttctgtcactgtggggactcaggc

SEQ ID NO: 294266 - DNA, 25 bp, probe
tttcttagctaagcggaccagcctc

SEQ ID NO: 294267 - DNA, 25 bp, probe
tttcttactagacctgtaacttttg

SEQ ID NO: 294268 - DNA, 25 bp, probe
tttcttactagacctgtaacttttg

SEQ ID NO: 294269 - DNA, 25 bp, probe
tttgttggctggacactgttttttc

SEQ ID NO: 294270 - DNA, 25 bp, probe
tttgctctgttagcacttttttctt

SEQ ID NO: 294271 - DNA, 25 bp, probe
tttgactgtcaaccgctggtttctc

SEQ ID NO: 294272 - DNA, 25 bp, probe
tttgccatgtctggggaggctcttt

SEQ ID NO: 294273 - DNA, 25 bp, probe
tttgctgatttcctgggtgcatgct

SEQ ID NO: 294274 - DNA, 25 bp, probe
tttgctgctgtttcatgtggactga

SEQ ID NO: 294275 - DNA, 25 bp, probe
tttgctctgatttccgtgacatggc

SEQ ID NO: 294276 - DNA, 25 bp, probe
tttgccatgtttgcttgtatgacca

SEQ ID NO: 294277 - DNA, 25 bp, probe
tttgccactgtcaactatttcacca

SEQ ID NO: 294278 - DNA, 25 bp, probe
tttctcgatggcaacgagctctccc

SEQ ID NO: 294279 - DNA, 25 bp, probe
tttctcgatggcaacgagctctccc

SEQ ID NO: 294280 - DNA, 25 bp, probe
tttcttgtgcgtgagagcctcagcc

SEQ ID NO: 294281 - DNA, 25 bp, probe
tttctctcagttgggatgcttcact

SEQ ID NO: 294282 - DNA, 25 bp, probe
tttgcacaagtgaaacatctctaca

SEQ ID NO: 294283 - DNA, 25 bp, probe
tttgccacagtaaactatttcacta

SEQ ID NO: 294284 - DNA, 25 bp, probe
tttccaatttctacctttactacat

SEQ ID NO: 294285 - DNA, 25 bp, probe
tttccattttcccctttatgtgaat

SEQ ID NO: 294286 - DNA, 25 bp, probe
tttccattttcccctttatgtgaat

SEQ ID NO: 294287 - DNA, 25 bp, probe
tttcaacttttcctttcatacgtct

SEQ ID NO: 294288 - DNA, 25 bp, probe
tttcctttttttctcacatggtttg

SEQ ID NO: 294289 - DNA, 25 bp, probe
tttcctctttaatagtagttttatg

SEQ ID NO: 294290 - DNA, 25 bp, probe
tttcctgtttactgattagagtggt

SEQ ID NO: 294291 - DNA, 25 bp, probe
tttcctgtttactgattagagtggt

SEQ ID NO: 294292 - DNA, 25 bp, probe
ttactttaggactgtgtagttgtat

SEQ ID NO: 294293 - DNA, 25 bp, probe
tttttctgggtctcttaatagaatt

SEQ ID NO: 294294 - DNA, 25 bp, probe
ttttcttgggttcctgtgagtagcc

SEQ ID NO: 294295 - DNA, 25 bp, probe
tttcctaaatgttcatatgggtagc

SEQ ID NO: 294296 - DNA, 25 bp, probe
tttgccgcccgagatatgagggagc

SEQ ID NO: 294297 - DNA, 25 bp, probe
tttccacgggcaggatgaggaggag

SEQ ID NO: 294298 - DNA, 25 bp, probe
tttccccaggcaggatgtgccagga

SEQ ID NO: 294299 - DNA, 25 bp, probe
tttccagcaagcacagatgtacagg

SEQ ID NO: 294300 - DNA, 25 bp, probe
tttgcgcattgtcatgggattctta

SEQ ID NO: 294301 - DNA, 25 bp, probe
tttctgcattccggggtgtatgtgt

SEQ ID NO: 294302 - DNA, 25 bp, probe
tttcgattggccagcgatgggtgtc

SEQ ID NO: 294303 - DNA, 25 bp, probe
tttgcgttgactgtgccatggagag

SEQ ID NO: 294304 - DNA, 25 bp, probe
tttgcggtgaagattatggaagtga

SEQ ID NO: 294305 - DNA, 25 bp, probe
tttatacatgatttttaggaagcta

SEQ ID NO: 294306 - DNA, 25 bp, probe
tttcatgactcagatccgagtgccc

SEQ ID NO: 294307 - DNA, 25 bp, probe
tttgctgaccaaatgcctggtacca

SEQ ID NO: 294308 - DNA, 25 bp, probe
tttgctgaccactgcatggggatcc

SEQ ID NO: 294309 - DNA, 25 bp, probe
tttgctatggactcatggctcgtcg

SEQ ID NO: 294310 - DNA, 25 bp, probe
tttaatggacttgggttccatgaat

SEQ ID NO: 294311 - DNA, 25 bp, probe
tttcacatgtacgtgggtgtccggg

SEQ ID NO: 294312 - DNA, 25 bp, probe
tttcaaggaccagtggttttggcga

SEQ ID NO: 294313 - DNA, 25 bp, probe
tttaggagaaaccagcttttactgt

SEQ ID NO: 294314 - DNA, 25 bp, probe
tttgagtatatcaatcctcttttga

SEQ ID NO: 294315 - DNA, 25 bp, probe
tttgctgttatattctctgtatctt

SEQ ID NO: 294316 - DNA, 25 bp, probe
tttgctgttatattctctgtatctt

SEQ ID NO: 294317 - DNA, 25 bp, probe
tttgctaaatagtcatgtgtttcat

SEQ ID NO: 294318 - DNA, 25 bp, probe
tttgccaaagtctagtgctggatct

SEQ ID NO: 294319 - DNA, 25 bp, probe
tttcaaagaggtggacgagtgctct

SEQ ID NO: 294320 - DNA, 25 bp, probe
tttcaaccagcattcatgccgaacc

SEQ ID NO: 294321 - DNA, 25 bp, probe
tttgagagctcaccttgcagcagac

SEQ ID NO: 294322 - DNA, 25 bp, probe
tttgagagctcaccttgcagcagac

SEQ ID NO: 294323 - DNA, 25 bp, probe
tttgaactagttgctgatatcagga

SEQ ID NO: 294324 - DNA, 25 bp, probe
tttgcaatgcattgtatggctttat

SEQ ID NO: 294325 - DNA, 25 bp, probe
tttgcagtgcatgattggcctatac

SEQ ID NO: 294326 - DNA, 25 bp, probe
tttgcaggcattttgacattcatca

SEQ ID NO: 294327 - DNA, 25 bp, probe
tttgcagcatgcttgactttaccaa

SEQ ID NO: 294328 - DNA, 25 bp, probe
tttgacacattgccttctagtgagt

SEQ ID NO: 294329 - DNA, 25 bp, probe
tttgctgttcagccttctagagagt

SEQ ID NO: 294330 - DNA, 25 bp, probe
tttctgttgcaccttgtagtggatt

SEQ ID NO: 294331 - DNA, 25 bp, probe
tttcatgtcactggtggtggggatc

SEQ ID NO: 294332 - DNA, 25 bp, probe
tttgcattgccaggcaggtggcagc

SEQ ID NO: 294333 - DNA, 25 bp, probe
tttcattcacagggatctggcagct

SEQ ID NO: 294334 - DNA, 25 bp, probe
ttaattcccgagatggagcttggga

SEQ ID NO: 294335 - DNA, 25 bp, probe
tttcagctcccaagtttagttcagg

SEQ ID NO: 294336 - DNA, 25 bp, probe
tttcgctctcgccgagtttgttagc

SEQ ID NO: 294337 - DNA, 25 bp, probe
tttcgctctcgccgagtttgttagc

SEQ ID NO: 294338 - DNA, 25 bp, probe
tttgcctcctgggggaggtcttgct

SEQ ID NO: 294339 - DNA, 25 bp, probe
tttgctctccggaaggaattctggt

SEQ ID NO: 294340 - DNA, 25 bp, probe
tttccacggaaacagaactcgatgc

SEQ ID NO: 294341 - DNA, 25 bp, probe
tttcaccagaaaaggagaactgcga

SEQ ID NO: 294342 - DNA, 25 bp, probe
tttcatccaaaccggcaaagcagta

SEQ ID NO: 294343 - DNA, 25 bp, probe
tttcccagagacccggggatggatt

SEQ ID NO: 294344 - DNA, 25 bp, probe
tttcctggattctactggggtgcgt

SEQ ID NO: 294345 - DNA, 25 bp, probe
tttactagattctagcaccgctgtc

SEQ ID NO: 294346 - DNA, 25 bp, probe
tttacgcaatagcgacgcgctggcg

SEQ ID NO: 294347 - DNA, 25 bp, probe
tttcaacttgagtgatctgagctga

SEQ ID NO: 294348 - DNA, 25 bp, probe
tttccacttcttgatatgactgaga

SEQ ID NO: 294349 - DNA, 25 bp, probe
tttgacacttgttgtccagttgaaa

SEQ ID NO: 294350 - DNA, 25 bp, probe
tttgctacttgtgtctcatcttcaa

SEQ ID NO: 294351 - DNA, 25 bp, probe
tttctacttactaccagcaatgcaa

SEQ ID NO: 294352 - DNA, 25 bp, probe
tttctaccatatcacttgtgcagaa

SEQ ID NO: 294353 - DNA, 25 bp, probe
tttccaccatcaaatgctgtagaat

SEQ ID NO: 294354 - DNA, 25 bp, probe
tttcccatccatagagcatgacagc

SEQ ID NO: 294355 - DNA, 25 bp, probe
tttgcccatctctttggacagtggc

SEQ ID NO: 294356 - DNA, 25 bp, probe
tttgctactcttgtcagacaatggc

SEQ ID NO: 294357 - DNA, 25 bp, probe
tttcccctgtgcaggctcaagagct

SEQ ID NO: 294358 - DNA, 25 bp, probe
tttcccctgtgcatgtgcgaaggaa

SEQ ID NO: 294359 - DNA, 25 bp, probe
tttccacctgtcagattggtgaaga

SEQ ID NO: 294360 - DNA, 25 bp, probe
tttccttgattcagactttgaatgt

SEQ ID NO: 294361 - DNA, 25 bp, probe
tttccttgattcagactttgaatgt

SEQ ID NO: 294362 - DNA, 25 bp, probe
tttccttgcataatccctttaacaa

SEQ ID NO: 294363 - DNA, 25 bp, probe
tttgccttcttatccctagatgaaa

SEQ ID NO: 294364 - DNA, 25 bp, probe
tttgccttcttatccctagatgaaa

SEQ ID NO: 294365 - DNA, 25 bp, probe
tttcgtttttcggctcagagaaagc

SEQ ID NO: 294366 - DNA, 25 bp, probe
tttgctctttacctactcagtgaaa

SEQ ID NO: 294367 - DNA, 25 bp, probe
tttcctttcccttccagaggtaatg

SEQ ID NO: 294368 - DNA, 25 bp, probe
tttctttaccttatcaaactacatg

SEQ ID NO: 294369 - DNA, 25 bp, probe
tttccttaaattatctaaaatctgc

SEQ ID NO: 294370 - DNA, 25 bp, probe
tttgccaagaatgttttcattaatc

SEQ ID NO: 294371 - DNA, 25 bp, probe
tttgcactagaagactttgttagaa

SEQ ID NO: 294372 - DNA, 25 bp, probe
tttcacatagatgtccctttcttgg

SEQ ID NO: 294373 - DNA, 25 bp, probe
tttaaaagtctgccttgtttatggt

SEQ ID NO: 294374 - DNA, 25 bp, probe
tttaattagtcaggcatccattttg

SEQ ID NO: 294375 - DNA, 25 bp, probe
tttaatgtcttctgcaccagtcctt

SEQ ID NO: 294376 - DNA, 25 bp, probe
tttacttctttatcaagcatccatc

SEQ ID NO: 294377 - DNA, 25 bp, probe
agagcctgtactttttgctggcatt

SEQ ID NO: 294378 - DNA, 25 bp, probe
tttcctctgtttgatactataaatt

SEQ ID NO: 294379 - DNA, 25 bp, probe
tttcctaatgttgtacctatatgtg

SEQ ID NO: 294380 - DNA, 25 bp, probe
tttccaaatgagcctttccctaggg

SEQ ID NO: 294381 - DNA, 25 bp, probe
tttctgcaatggatcctgtccacaa

SEQ ID NO: 294382 - DNA, 25 bp, probe
tttctgagaggcagtcttccttggc

SEQ ID NO: 294383 - DNA, 25 bp, probe
tttcttgcaggtttgcttcaagctg

SEQ ID NO: 294384 - DNA, 25 bp, probe
tttcttgcaggtttgcttcaagctg

SEQ ID NO: 294385 - DNA, 25 bp, probe
tttccgctggtgtatcagttagtgc

SEQ ID NO: 294386 - DNA, 25 bp, probe
tttccctggaatacctttgcatcac

SEQ ID NO: 294387 - DNA, 25 bp, probe
tttgacttcgtactgtctttcacct

SEQ ID NO: 294388 - DNA, 25 bp, probe
tttgacttcgtattgacccttatct

SEQ ID NO: 294389 - DNA, 25 bp, probe
tttgacttggtgaatatccatcttt

SEQ ID NO: 294390 - DNA, 25 bp, probe
tttacatggggttttcaattttgca

SEQ ID NO: 294391 - DNA, 25 bp, probe
tttcactttggatttgtttttggca

SEQ ID NO: 294392 - DNA, 25 bp, probe
ttacctttgaaaagcttctactggc

SEQ ID NO: 294393 - DNA, 25 bp, probe
tttccagtatgaaaagctatcttaa

SEQ ID NO: 294394 - DNA, 25 bp, probe
tttccagatttttcactagcgtaca

SEQ ID NO: 294395 - DNA, 25 bp, probe
tttcggaatccttctctgggaaatc

SEQ ID NO: 294396 - DNA, 25 bp, probe
tttagcaatatgacattcttggtga

SEQ ID NO: 294397 - DNA, 25 bp, probe
tttgcaggattcaaccttgtgtact

SEQ ID NO: 294398 - DNA, 25 bp, probe
tttgcaggattcaaccttgtgtact

SEQ ID NO: 294399 - DNA, 25 bp, probe
tttcctgtagtcccattgatgtact

SEQ ID NO: 294400 - DNA, 25 bp, probe
tttgctaaagacacagtgcttactt

SEQ ID NO: 294401 - DNA, 25 bp, probe
tttgcttcaaaaacattcttacatt

SEQ ID NO: 294402 - DNA, 25 bp, probe
tttgcttcaaaaacattcttacatt

SEQ ID NO: 294403 - DNA, 25 bp, probe
tttgcttcaagctgtaatttagcaa

SEQ ID NO: 294404 - DNA, 25 bp, probe
tttcgaagagcatgtgaagttacaa

SEQ ID NO: 294405 - DNA, 25 bp, probe
tttaacaaggttcagttcacagaga

SEQ ID NO: 294406 - DNA, 25 bp, probe
tttacccatggtttaggaaagcaat

SEQ ID NO: 294407 - DNA, 25 bp, probe
tttatcctttgtttcaccaaccagt

SEQ ID NO: 294408 - DNA, 25 bp, probe
tttctgctcttcgtgttacaaacca

SEQ ID NO: 294409 - DNA, 25 bp, probe
tttgcatattgtctgattaaacaca

SEQ ID NO: 294410 - DNA, 25 bp, probe
tttgcattcgagttttaaacactgt

SEQ ID NO: 294411 - DNA, 25 bp, probe
tttgcattcgagttttaaacactgt

SEQ ID NO: 294412 - DNA, 25 bp, probe
tttcctcaggtcattgccaacctta

SEQ ID NO: 294413 - DNA, 25 bp, probe
tttccatcacttattacaattttct

SEQ ID NO: 294414 - DNA, 25 bp, probe
tttccagcttttatacacacgtatc

SEQ ID NO: 294415 - DNA, 25 bp, probe
tttccatctttaagttcccagacca

SEQ ID NO: 294416 - DNA, 25 bp, probe
tttgctttttattgaatgctccaaa

SEQ ID NO: 294417 - DNA, 25 bp, probe
tttgctgtcattctgagcagcgtca

SEQ ID NO: 294418 - DNA, 25 bp, probe
tttgcatttatctgaagcagtatac

SEQ ID NO: 294419 - DNA, 25 bp, probe
tttgcattgcagtcatagaagagat

SEQ ID NO: 294420 - DNA, 25 bp, probe
tttgcactggcattaaagagtcata

SEQ ID NO: 294421 - DNA, 25 bp, probe
tttgcgttgactttcaggtcagcaa

SEQ ID NO: 294422 - DNA, 25 bp, probe
tttcgtctgcactaccaattcaatg

SEQ ID NO: 294423 - DNA, 25 bp, probe
tttcacccttcagcaacatgcagag

SEQ ID NO: 294424 - DNA, 25 bp, probe
tttccaccttgcctgagactggcat

SEQ ID NO: 294425 - DNA, 25 bp, probe
tttccaccttgcctgagactggcat

SEQ ID NO: 294426 - DNA, 25 bp, probe
tttgcctgctcaggccatgaaagag

SEQ ID NO: 294427 - DNA, 25 bp, probe
tttgcctgcttggcctatcaaggta

SEQ ID NO: 294428 - DNA, 25 bp, probe
tttgctctcagctaactatcagggt

SEQ ID NO: 294429 - DNA, 25 bp, probe
tttgcctcagccacagaatttgtaa

SEQ ID NO: 294430 - DNA, 25 bp, probe
tttcccccgatccaagttgtagatg

SEQ ID NO: 294431 - DNA, 25 bp, probe
tttccccttgtctttgttgtaagag

SEQ ID NO: 294432 - DNA, 25 bp, probe
tttcctacttccttgtctttgaaat

SEQ ID NO: 294433 - DNA, 25 bp, probe
tttctgctatttactgctcttattg

SEQ ID NO: 294434 - DNA, 25 bp, probe
tttgctctgatcattgctgattcct

SEQ ID NO: 294435 - DNA, 25 bp, probe
tttgctgaactttctcagtcctgat

SEQ ID NO: 294436 - DNA, 25 bp, probe
tttcatgaaagttctcagtattgta

SEQ ID NO: 294437 - DNA, 25 bp, probe
ttatctgaactggactagtgaaaaa

SEQ ID NO: 294438 - DNA, 25 bp, probe
tttcttcctcagtgagtacagaaac

SEQ ID NO: 294439 - DNA, 25 bp, probe
tttttcctcatacaagtaaacacag

SEQ ID NO: 294440 - DNA, 25 bp, probe
tttttccctaaaagtgtcattacat

SEQ ID NO: 294441 - DNA, 25 bp, probe
tttttccctaaaagtgtcattacat

SEQ ID NO: 294442 - DNA, 25 bp, probe
ttttagaccaagttgaggtctgttc

SEQ ID NO: 294443 - DNA, 25 bp, probe
tttctaaagctttctgggctcttcc

SEQ ID NO: 294444 - DNA, 25 bp, probe
tttctcaggatgcttcttacctgtc

SEQ ID NO: 294445 - DNA, 25 bp, probe
tttctcaggatgcttcttacctgtc

SEQ ID NO: 294446 - DNA, 25 bp, probe
tttctgggagcacttgctccactcc

SEQ ID NO: 294447 - DNA, 25 bp, probe
tttctttggcactcttactgcctgt

SEQ ID NO: 294448 - DNA, 25 bp, probe
ttttttccagccgttgaccaattat

SEQ ID NO: 294449 - DNA, 25 bp, probe
ttcttcttccctgggggacaagtca

SEQ ID NO: 294450 - DNA, 25 bp, probe
ttctgcctataccctggggtaagtg

SEQ ID NO: 294451 - DNA, 25 bp, probe
tttgctctcagaaccttggggaagg

SEQ ID NO: 294452 - DNA, 25 bp, probe
tttgctctcagaaccttggggaagg

SEQ ID NO: 294453 - DNA, 25 bp, probe
tttctccagcaaatttgaggaagca

SEQ ID NO: 294454 - DNA, 25 bp, probe
tttcttaggagattatgtggacaga

SEQ ID NO: 294455 - DNA, 25 bp, probe
ttttatcattagagtgggatgctga

SEQ ID NO: 294456 - DNA, 25 bp, probe
tttttttagtatagcgtatcgcaag

SEQ ID NO: 294457 - DNA, 25 bp, probe
tttttctaagaagctgtcctacaaa

SEQ ID NO: 294458 - DNA, 25 bp, probe
tttttaaagaggattctcataagga

SEQ ID NO: 294459 - DNA, 25 bp, probe
tttcttagaagggagaggctgcggg

SEQ ID NO: 294460 - DNA, 25 bp, probe
tttcaagaagggggaatgctgtcgg

SEQ ID NO: 294461 - DNA, 25 bp, probe
tttccgaaggcgataatgttctggt

SEQ ID NO: 294462 - DNA, 25 bp, probe
tttgccgagaggtgtccattctctg

SEQ ID NO: 294463 - DNA, 25 bp, probe
tttcctgagatgcacttacttctca

SEQ ID NO: 294464 - DNA, 25 bp, probe
tttccagcagcatacattttattca

SEQ ID NO: 294465 - DNA, 25 bp, probe
tttccagcagcatacattttattca

SEQ ID NO: 294466 - DNA, 25 bp, probe
tttccaatcacagtgttatgtagta

SEQ ID NO: 294467 - DNA, 25 bp, probe
tttccattcaaggttgtgcttgtga

SEQ ID NO: 294468 - DNA, 25 bp, probe
tttccattctgggtgttttcagaaa

SEQ ID NO: 294469 - DNA, 25 bp, probe
tttctcactaggcatgtcttgggaa

SEQ ID NO: 294470 - DNA, 25 bp, probe
tttcacaaatggcagacttgaagat

SEQ ID NO: 294471 - DNA, 25 bp, probe
tttcacaaagggttatctgataacc

SEQ ID NO: 294472 - DNA, 25 bp, probe
tttcacggcagctggctacaattcc

SEQ ID NO: 294473 - DNA, 25 bp, probe
tttccggcagaacgcatccactttc

SEQ ID NO: 294474 - DNA, 25 bp, probe
tttctagagccaggacacagacctt

SEQ ID NO: 294475 - DNA, 25 bp, probe
ttttgaatacatgcacacagacctg

SEQ ID NO: 294476 - DNA, 25 bp, probe
tttctgtaaactgcctgtccatgct

SEQ ID NO: 294477 - DNA, 25 bp, probe
tttctgataacagctctcttccttt

SEQ ID NO: 294478 - DNA, 25 bp, probe
ttttgaacaaggtgcttcgcttctc

SEQ ID NO: 294479 - DNA, 25 bp, probe
ttttcaaagaggtggacgagtgctc

SEQ ID NO: 294480 - DNA, 25 bp, probe
tttttcaaagaggtggacgagtgct

SEQ ID NO: 294481 - DNA, 25 bp, probe
tttctctcgcactgcctggaaagtg

SEQ ID NO: 294482 - DNA, 25 bp, probe
tttctcgcagtcttcctggaaaata

SEQ ID NO: 294483 - DNA, 25 bp, probe
tttccgagctcttccggatcggatc

SEQ ID NO: 294484 - DNA, 25 bp, probe
tttctgcaagcgttgcctggatgcg

SEQ ID NO: 294485 - DNA, 25 bp, probe
tttgctgcacagaatttgcatcaaa

SEQ ID NO: 294486 - DNA, 25 bp, probe
tttgctgcacagaatttgcatcaaa

SEQ ID NO: 294487 - DNA, 25 bp, probe
tttgctgcacagaatatcaccattg

SEQ ID NO: 294488 - DNA, 25 bp, probe
tttgctgacaaatttcatatgtgta

SEQ ID NO: 294489 - DNA, 25 bp, probe
tttgctgagcaaatttggctgctgt

SEQ ID NO: 294490 - DNA, 25 bp, probe
tttgcagaaagctttgagctctgtg

SEQ ID NO: 294491 - DNA, 25 bp, probe
tttctggatcccctggcttatgaaa

SEQ ID NO: 294492 - DNA, 25 bp, probe
tttctctgaccgcctactggaaata

SEQ ID NO: 294493 - DNA, 25 bp, probe
tttcctgatcccgatgttagaaatg

SEQ ID NO: 294494 - DNA, 25 bp, probe
tttgcagtggcttaatgtttgaaat

SEQ ID NO: 294495 - DNA, 25 bp, probe
tttcaggctccatctgtttggagaa

SEQ ID NO: 294496 - DNA, 25 bp, probe
tttcgacgaaacatctctgcaaaga

SEQ ID NO: 294497 - DNA, 25 bp, probe
tttccactgagatctactggataaa

SEQ ID NO: 294498 - DNA, 25 bp, probe
tttccatggactctcctggcaaaga

SEQ ID NO: 294499 - DNA, 25 bp, probe
tttaacagcattctcaatcagccaa

SEQ ID NO: 294500 - DNA, 25 bp, probe
tttacatatgtacggcccatctcaa

SEQ ID NO: 294501 - DNA, 25 bp, probe
tttagcatttgggagctcaccattc

SEQ ID NO: 294502 - DNA, 25 bp, probe
tttcagcatttggagacatccccat

SEQ ID NO: 294503 - DNA, 25 bp, probe
tttccatctagcaagttcccaaagg

SEQ ID NO: 294504 - DNA, 25 bp, probe
tttcctcatacaagtaaacacagaa

SEQ ID NO: 294505 - DNA, 25 bp, probe
tttgcctcacctaaagagaccaagg

SEQ ID NO: 294506 - DNA, 25 bp, probe
tttgcctcacctaaagagaccaagg

SEQ ID NO: 294507 - DNA, 25 bp, probe
tttgcctcacctaataggctgggag

SEQ ID NO: 294508 - DNA, 25 bp, probe
tttccatcctttagcaggctgggcc

SEQ ID NO: 294509 - DNA, 25 bp, probe
tttctcagctctattcaggccaggt

SEQ ID NO: 294510 - DNA, 25 bp, probe
tttctcatcttcataataccagtgt

SEQ ID NO: 294511 - DNA, 25 bp, probe
tttctactatccttgctaagttttc

SEQ ID NO: 294512 - DNA, 25 bp, probe
tttcctccacctgcgaaggtattct

SEQ ID NO: 294513 - DNA, 25 bp, probe
tttccccatcctgtgttgatgatat

SEQ ID NO: 294514 - DNA, 25 bp, probe
tttcctcataccacttgctattatt

SEQ ID NO: 294515 - DNA, 25 bp, probe
tttcccatgcatttactagattcta

SEQ ID NO: 294516 - DNA, 25 bp, probe
tttcctgcacattctgtcaaattct

SEQ ID NO: 294517 - DNA, 25 bp, probe
tttcccagcatcatgtagtgcattt

SEQ ID NO: 294518 - DNA, 25 bp, probe
tttctggctgactattactcagttt

SEQ ID NO: 294519 - DNA, 25 bp, probe
tttcagtgcacccaattactgttat

SEQ ID NO: 294520 - DNA, 25 bp, probe
tttcctgacacgcatctttgcttac

SEQ ID NO: 294521 - DNA, 25 bp, probe
tttccaatacgattttctgttgcac

SEQ ID NO: 294522 - DNA, 25 bp, probe
tttccagaacagtgccttggtcatc

SEQ ID NO: 294523 - DNA, 25 bp, probe
tttctcagaaggtgtttggtatggg

SEQ ID NO: 294524 - DNA, 25 bp, probe
tttcctgggtagtatttgggagagg

SEQ ID NO: 294525 - DNA, 25 bp, probe
tttgctgtggggacctgattggggg

SEQ ID NO: 294526 - DNA, 25 bp, probe
tttgctggatggttcctttatgcag

SEQ ID NO: 294527 - DNA, 25 bp, probe
tttgctggatggttcctttatgcag

SEQ ID NO: 294528 - DNA, 25 bp, probe
tttaggggatgaccttgaatgatgc

SEQ ID NO: 294529 - DNA, 25 bp, probe
tttaaaacatgctctcttagatcag

SEQ ID NO: 294530 - DNA, 25 bp, probe
tttaagcaggcgtttatttctgcag

SEQ ID NO: 294531 - DNA, 25 bp, probe
tttcccagtgcttttcttttacaag

SEQ ID NO: 294532 - DNA, 25 bp, probe
tttccttttctgatcattcttacaa

SEQ ID NO: 294533 - DNA, 25 bp, probe
tttccttttgtgttctgtcaccaac

SEQ ID NO: 294534 - DNA, 25 bp, probe
tttctgtccttgctttggcacaaca

SEQ ID NO: 294535 - DNA, 25 bp, probe
tttagtcgtggcatttaccctgcag

SEQ ID NO: 294536 - DNA, 25 bp, probe
tttagggggttggtatctcgtgctc

SEQ ID NO: 294537 - DNA, 25 bp, probe
tttaggggcagttaaatatcctcta

SEQ ID NO: 294538 - DNA, 25 bp, probe
tttagtgtggcagaataataacatc

SEQ ID NO: 294539 - DNA, 25 bp, probe
ttctatgtatggggtagtctaatat

SEQ ID NO: 294540 - DNA, 25 bp, probe
ttctatgtatggggtagtctaatat

SEQ ID NO: 294541 - DNA, 25 bp, probe
tttatctatacggtggtccagcatc

SEQ ID NO: 294542 - DNA, 25 bp, probe
tttacatagtcatcatggtcaccat

SEQ ID NO: 294543 - DNA, 25 bp, probe
tttacaattgcattcgaaaacacca

SEQ ID NO: 294544 - DNA, 25 bp, probe
tttctcatttgccaataataatacc

SEQ ID NO: 294545 - DNA, 25 bp, probe
tttcacacattcactagtaataggc

SEQ ID NO: 294546 - DNA, 25 bp, probe
tttcactcagttccggataatcctc

SEQ ID NO: 294547 - DNA, 25 bp, probe
tttctactttcgcaatcacttctgc

SEQ ID NO: 294548 - DNA, 25 bp, probe
ttccatccatttttaactctttcgg

SEQ ID NO: 294549 - DNA, 25 bp, probe
ttccatccatttttaactctttcgg

SEQ ID NO: 294550 - DNA, 25 bp, probe
tttccttttggctaacttcttctgg

SEQ ID NO: 294551 - DNA, 25 bp, probe
tttcctttaggctaagactgcctgt

SEQ ID NO: 294552 - DNA, 25 bp, probe
tttcctttagccttagcagtgggta

SEQ ID NO: 294553 - DNA, 25 bp, probe
tttactgttacctgaatttattata

SEQ ID NO: 294554 - DNA, 25 bp, probe
tttactgttacctgaatttattata

SEQ ID NO: 294555 - DNA, 25 bp, probe
tttactattacgtgctattttacat

SEQ ID NO: 294556 - DNA, 25 bp, probe
tttagcttctaggatccaagtttcc

SEQ ID NO: 294557 - DNA, 25 bp, probe
tttcacaagctaccatctcagatat

SEQ ID NO: 294558 - DNA, 25 bp, probe
tttcagcaggctgtctgctcaacag

SEQ ID NO: 294559 - DNA, 25 bp, probe
tttccaggctctttgtatgagaaaa

SEQ ID NO: 294560 - DNA, 25 bp, probe
tttacatggcttctttaatgaatca

SEQ ID NO: 294561 - DNA, 25 bp, probe
tttacatggcttctttaatgaatca

SEQ ID NO: 294562 - DNA, 25 bp, probe
tttacaggccccaattatccaatag

SEQ ID NO: 294563 - DNA, 25 bp, probe
tttccttgccccaaattatctatgg

SEQ ID NO: 294564 - DNA, 25 bp, probe
tttgctatgtgctcctaatgtatct

SEQ ID NO: 294565 - DNA, 25 bp, probe
tttctcatgtgtttgcataaacatt

SEQ ID NO: 294566 - DNA, 25 bp, probe
tttccatcatattgtaaatagtgac

SEQ ID NO: 294567 - DNA, 25 bp, probe
tttctcagatgttgaaactttgaat

SEQ ID NO: 294568 - DNA, 25 bp, probe
tttccaggtcagaaaccattgttca

SEQ ID NO: 294569 - DNA, 25 bp, probe
tttgccgtatcaagtacctacttca

SEQ ID NO: 294570 - DNA, 25 bp, probe
tttgcttttgcaaataggtatttca

SEQ ID NO: 294571 - DNA, 25 bp, probe
tttctacattaatcagtgttttctg

SEQ ID NO: 294572 - DNA, 25 bp, probe
ttttactcagaatagcctgttttgt

SEQ ID NO: 294573 - DNA, 25 bp, probe
ttttaaagacgaccagctcttcatt

SEQ ID NO: 294574 - DNA, 25 bp, probe
tttttaaactattagcctggcgtgg

SEQ ID NO: 294575 - DNA, 25 bp, probe
tttttaaagctatatgtttcactgc

SEQ ID NO: 294576 - DNA, 25 bp, probe
ttttagaccctctacattgttctct

SEQ ID NO: 294577 - DNA, 25 bp, probe
ttttttgccccatgatttttctttg

SEQ ID NO: 294578 - DNA, 25 bp, probe
tttttatccccaaattgttgctatt

SEQ ID NO: 294579 - DNA, 25 bp, probe
tttcctatcaccatacttttccatg

SEQ ID NO: 294580 - DNA, 25 bp, probe
tttccgtgctacactttgtgtcctg

SEQ ID NO: 294581 - DNA, 25 bp, probe
tttccgtgctacactttgtgtcctg

SEQ ID NO: 294582 - DNA, 25 bp, probe
tttgcctggcccgttgaagttccag

SEQ ID NO: 294583 - DNA, 25 bp, probe
ttagcccgctccttggaagttagac

SEQ ID NO: 294584 - DNA, 25 bp, probe
ttacccagatcctatggttcgaagt

SEQ ID NO: 294585 - DNA, 25 bp, probe
tttccacagtccttgtgctctgaga

SEQ ID NO: 294586 - DNA, 25 bp, probe
tttccacagtccttgtgctctgaga

SEQ ID NO: 294587 - DNA, 25 bp, probe
tttctcattgtctttttgcatcagt

SEQ ID NO: 294588 - DNA, 25 bp, probe
tttgccttgctcattgctatcagca

SEQ ID NO: 294589 - DNA, 25 bp, probe
tttgctctttctgatgctctcaaac

SEQ ID NO: 294590 - DNA, 25 bp, probe
tttctacttctggtcatgcttacac

SEQ ID NO: 294591 - DNA, 25 bp, probe
tttctgatgtttggtgatctagaca

SEQ ID NO: 294592 - DNA, 25 bp, probe
tttctgatgctgactggcaccttac

SEQ ID NO: 294593 - DNA, 25 bp, probe
tttctgctgcgcatcaacttcaaca

SEQ ID NO: 294594 - DNA, 25 bp, probe
tttctctgcctggcaacatcttact

SEQ ID NO: 294595 - DNA, 25 bp, probe
tttcttcctgcttatatttaggaac

SEQ ID NO: 294596 - DNA, 25 bp, probe
tttctgtgcccttactttcaacaaa

SEQ ID NO: 294597 - DNA, 25 bp, probe
tttcgtgcactttttacataacaaa

SEQ ID NO: 294598 - DNA, 25 bp, probe
tttcggccttagttatgccaaaaat

SEQ ID NO: 294599 - DNA, 25 bp, probe
tttcccactttattatgaccaaaca

SEQ ID NO: 294600 - DNA, 25 bp, probe
tttcccactttattatgaccaaaca

SEQ ID NO: 294601 - DNA, 25 bp, probe
tttcccttttagaatacattaaatg

SEQ ID NO: 294602 - DNA, 25 bp, probe
ttttactttaccttcactaacaatg

SEQ ID NO: 294603 - DNA, 25 bp, probe
ttttgcccctacgtctgaataaaag

SEQ ID NO: 294604 - DNA, 25 bp, probe
tttccctcccattgtcattgaaaaa

SEQ ID NO: 294605 - DNA, 25 bp, probe
tttcccatctccaactcggaagtaa

SEQ ID NO: 294606 - DNA, 25 bp, probe
tttcctgtctgacacctggagcatg

SEQ ID NO: 294607 - DNA, 25 bp, probe
tttcctgtctgacacctggagcatg

SEQ ID NO: 294608 - DNA, 25 bp, probe
tttctctgtcagcgaacgtggcatt

SEQ ID NO: 294609 - DNA, 25 bp, probe
ggatcctccagatggttgctgatgg

SEQ ID NO: 294610 - DNA, 25 bp, probe
tttctctggtggcattcctttagga

SEQ ID NO: 294611 - DNA, 25 bp, probe
tttcttgggttaatccatgttcaat

SEQ ID NO: 294612 - DNA, 25 bp, probe
tttcttactttaatgtacttctatc

SEQ ID NO: 294613 - DNA, 25 bp, probe
ttttacatccttgattacttccact

SEQ ID NO: 294614 - DNA, 25 bp, probe
tttaacactctagctattcttcgtc

SEQ ID NO: 294615 - DNA, 25 bp, probe
tttatacaagcatgcccaatcttag

SEQ ID NO: 294616 - DNA, 25 bp, probe
tttatctcaacagtgccatcaaccc

SEQ ID NO: 294617 - DNA, 25 bp, probe
tttagataccatcgcctatgagccc

SEQ ID NO: 294618 - DNA, 25 bp, probe
tttcaggactctggcctcagaggac

SEQ ID NO: 294619 - DNA, 25 bp, probe
tttcagagacatcctgctgcgagag

SEQ ID NO: 294620 - DNA, 25 bp, probe
tttcaggacatctcggaggaggcca

SEQ ID NO: 294621 - DNA, 25 bp, probe
tttcaggaccacagtccaagcccat

SEQ ID NO: 294622 - DNA, 25 bp, probe
tttcaggatccccgtggattctgct

SEQ ID NO: 294623 - DNA, 25 bp, probe
tttactgaccgttgtgaatttctgt

SEQ ID NO: 294624 - DNA, 25 bp, probe
tttaatgttatgaggacgtgtctgt

SEQ ID NO: 294625 - DNA, 25 bp, probe
tttacatggtagatcaacaattctt

SEQ ID NO: 294626 - DNA, 25 bp, probe
tttccaggttgcaaaaatgatcaat

SEQ ID NO: 294627 - DNA, 25 bp, probe
tttccagttttccacaaatacttga

SEQ ID NO: 294628 - DNA, 25 bp, probe
tttaagtccttttcaaaactgtgca

SEQ ID NO: 294629 - DNA, 25 bp, probe
tttacactcgctgctctcaataaat

SEQ ID NO: 294630 - DNA, 25 bp, probe
ttaaacaggaccttccaaaatatct

SEQ ID NO: 294631 - DNA, 25 bp, probe
ttaaatggaactatctccaaatttt

SEQ ID NO: 294632 - DNA, 25 bp, probe
ttgtaaagaaatatctccgaagtta

SEQ ID NO: 294633 - DNA, 25 bp, probe
tttaaccaaatacctcctcagtaat

SEQ ID NO: 294634 - DNA, 25 bp, probe
tttaaccaaatacctcctcagtaat

SEQ ID NO: 294635 - DNA, 25 bp, probe
tttaccaaaaactttcgcagagatt

SEQ ID NO: 294636 - DNA, 25 bp, probe
tttagcccataatctctttgaaggt

SEQ ID NO: 294637 - DNA, 25 bp, probe
ttttcacctaagtcatctttgaggt

SEQ ID NO: 294638 - DNA, 25 bp, probe
ttgtttataacagtgccttaaggta

SEQ ID NO: 294639 - DNA, 25 bp, probe
tttttgaaaactgcggtggaggaag

SEQ ID NO: 294640 - DNA, 25 bp, probe
ttttgtccccctgctggggggacag

SEQ ID NO: 294641 - DNA, 25 bp, probe
ttttctgttccctgctgggtgggaa

SEQ ID NO: 294642 - DNA, 25 bp, probe
tttcttgtttcctctgggatgctga

SEQ ID NO: 294643 - DNA, 25 bp, probe
tttctctgttaattcctggaactgt

SEQ ID NO: 294644 - DNA, 25 bp, probe
tttccagtaaaaacatgaccagctt

SEQ ID NO: 294645 - DNA, 25 bp, probe
tttccagtaaaaacatgaccagctt

SEQ ID NO: 294646 - DNA, 25 bp, probe
tttgccatgtaaactaacattcact

SEQ ID NO: 294647 - DNA, 25 bp, probe
tttccatgtatgtccttacatttct

SEQ ID NO: 294648 - DNA, 25 bp, probe
tttgccattatttcttcagttttct

SEQ ID NO: 294649 - DNA, 25 bp, probe
tttccagtctattttctgtcttgtt

SEQ ID NO: 294650 - DNA, 25 bp, probe
tttcacctctgaaattattctgggt

SEQ ID NO: 294651 - DNA, 25 bp, probe
tttagagagctaagattatctgggg

SEQ ID NO: 294652 - DNA, 25 bp, probe
tttcaacagccaactctgctgtggg

SEQ ID NO: 294653 - DNA, 25 bp, probe
tttcattatcgctacgggtggtctt

SEQ ID NO: 294654 - DNA, 25 bp, probe
tttcattatcgctacgggtggtctt

SEQ ID NO: 294655 - DNA, 25 bp, probe
tttatgcttagaacaccagggttta

SEQ ID NO: 294656 - DNA, 25 bp, probe
tttcagtggagaaagcggtcctctg

SEQ ID NO: 294657 - DNA, 25 bp, probe
tttattggcagcccacgaacacctg

SEQ ID NO: 294658 - DNA, 25 bp, probe
ttgtttgacgacgaaaacacagccc

SEQ ID NO: 294659 - DNA, 25 bp, probe
ttttcgcggccagacaatcaagctc

SEQ ID NO: 294660 - DNA, 25 bp, probe
ttgtgaccgtgccaagaaaacgtaa

SEQ ID NO: 294661 - DNA, 25 bp, probe
tttagggtacactcagaccgtaaag

SEQ ID NO: 294662 - DNA, 25 bp, probe
tttctgggaaactcaatcctagaag

SEQ ID NO: 294663 - DNA, 25 bp, probe
ttatgctgggaatctagggcctgga

SEQ ID NO: 294664 - DNA, 25 bp, probe
tttatgctgggaatctagggcctgg

SEQ ID NO: 294665 - DNA, 25 bp, probe
ttatgatctgggatcagaagtctct

SEQ ID NO: 294666 - DNA, 25 bp, probe
tttctcttggcaatcagaaggctgc

SEQ ID NO: 294667 - DNA, 25 bp, probe
tttgcctctactacgtcaggcagaa

SEQ ID NO: 294668 - DNA, 25 bp, probe
tttcctgtagctactgtgcagacca

SEQ ID NO: 294669 - DNA, 25 bp, probe
tttcctgctgagattcatcaatgcc

SEQ ID NO: 294670 - DNA, 25 bp, probe
tttctctggctgatgtgctcgtgac

SEQ ID NO: 294671 - DNA, 25 bp, probe
tttcctgcagaattcgccatgtact

SEQ ID NO: 294672 - DNA, 25 bp, probe
tttgccaaaagtgccactatctaca

SEQ ID NO: 294673 - DNA, 25 bp, probe
tttgccaaaagtgccactatctaca

SEQ ID NO: 294674 - DNA, 25 bp, probe
tttccaaaagtggcctctttgtcta

SEQ ID NO: 294675 - DNA, 25 bp, probe
tttccaaaatcttccttatgtgtaa

SEQ ID NO: 294676 - DNA, 25 bp, probe
tttcctagaaaacccattgtgtctc

SEQ ID NO: 294677 - DNA, 25 bp, probe
tttcctagaaaacccattgtgtctc

SEQ ID NO: 294678 - DNA, 25 bp, probe
tttccatgggactatcctttttctc

SEQ ID NO: 294679 - DNA, 25 bp, probe
tttccatgggactatcctttttctc

SEQ ID NO: 294680 - DNA, 25 bp, probe
tttcgggctgaccatgactgttttc

SEQ ID NO: 294681 - DNA, 25 bp, probe
tttctggtgttactggtttcttaca

SEQ ID NO: 294682 - DNA, 25 bp, probe
tttctggtgttatatctttattaaa

SEQ ID NO: 294683 - DNA, 25 bp, probe
tttaggtggtgctggtttatgttct

SEQ ID NO: 294684 - DNA, 25 bp, probe
tttcagttgctgcgaggtctgtctt

SEQ ID NO: 294685 - DNA, 25 bp, probe
tttcagttgctgcgaggtctgtctt

SEQ ID NO: 294686 - DNA, 25 bp, probe
ttataattgcatctaggtaattttt

SEQ ID NO: 294687 - DNA, 25 bp, probe
tttactttgctttggttactttgct

SEQ ID NO: 294688 - DNA, 25 bp, probe
tttccttccacaggtttgaggttct

SEQ ID NO: 294689 - DNA, 25 bp, probe
tttcacttctactctatttcagttc

SEQ ID NO: 294690 - DNA, 25 bp, probe
tttctccttatctgtgcagtacagg

SEQ ID NO: 294691 - DNA, 25 bp, probe
ttttacgcgtcgcccaatgacagga

SEQ ID NO: 294692 - DNA, 25 bp, probe
ttttacgcgtcgcccaatgacagga

SEQ ID NO: 294693 - DNA, 25 bp, probe
ttttccgagctcttccggatcggat

SEQ ID NO: 294694 - DNA, 25 bp, probe
tttctttatgctttccttacaggat

SEQ ID NO: 294695 - DNA, 25 bp, probe
tttcttatagcaatacactgtaata

SEQ ID NO: 294696 - DNA, 25 bp, probe
tttcttatagcaatacactgtaata

SEQ ID NO: 294697 - DNA, 25 bp, probe
tttccatatggcaataggtgtgaac

SEQ ID NO: 294698 - DNA, 25 bp, probe
tttgccagtgccaacagcgtgctgg

SEQ ID NO: 294699 - DNA, 25 bp, probe
tttcagcagctcaaacaggtggtag

SEQ ID NO: 294700 - DNA, 25 bp, probe
tttagagcccaatttgtggtctacc

SEQ ID NO: 294701 - DNA, 25 bp, probe
tttcagattgcctttctgggcctga

SEQ ID NO: 294702 - DNA, 25 bp, probe
tttcatattctctttgtgaggacaa

SEQ ID NO: 294703 - DNA, 25 bp, probe
tttctatgttttatgggacccccat

SEQ ID NO: 294704 - DNA, 25 bp, probe
tttctatgttttatgggacccccat

SEQ ID NO: 294705 - DNA, 25 bp, probe
tttcttgattttatgattccttgcc

SEQ ID NO: 294706 - DNA, 25 bp, probe
tttcctgttttttgtctatgtccca

SEQ ID NO: 294707 - DNA, 25 bp, probe
tttctctgttttctggctgaacaca

SEQ ID NO: 294708 - DNA, 25 bp, probe
tttcctttgatcttgtggctaaacc

SEQ ID NO: 294709 - DNA, 25 bp, probe
tttcctttgatgacatgtcctgcat

SEQ ID NO: 294710 - DNA, 25 bp, probe
tttcctattggacctgatcatgaat

SEQ ID NO: 294711 - DNA, 25 bp, probe
tttcctattggacctgatcatgaat

SEQ ID NO: 294712 - DNA, 25 bp, probe
tttccttgtgtgtagctgctcggac

SEQ ID NO: 294713 - DNA, 25 bp, probe
tttccttgtgtgtagctgctcggac

SEQ ID NO: 294714 - DNA, 25 bp, probe
tttctttgtgtgtgcttctagcagc

SEQ ID NO: 294715 - DNA, 25 bp, probe
tttctcattatgttacttctagtgt

SEQ ID NO: 294716 - DNA, 25 bp, probe
tttctctgctattaactggctagaa

SEQ ID NO: 294717 - DNA, 25 bp, probe
tttcttctactccagtggtgagaag

SEQ ID NO: 294718 - DNA, 25 bp, probe
tttcttctcatcagagcactgggac

SEQ ID NO: 294719 - DNA, 25 bp, probe
tttcttcttgcagagcaagggcatc

SEQ ID NO: 294720 - DNA, 25 bp, probe
tttctcctgttggctcacagggctg

SEQ ID NO: 294721 - DNA, 25 bp, probe
tttcatcgagattgcctacaagcgg

SEQ ID NO: 294722 - DNA, 25 bp, probe
tttcagctgaggctctgagaactgg

SEQ ID NO: 294723 - DNA, 25 bp, probe
tttcagctgggaacatggcaggtga

SEQ ID NO: 294724 - DNA, 25 bp, probe
tttccattgtgaccagcagcaggct

SEQ ID NO: 294725 - DNA, 25 bp, probe
tttccagtgtgacccagataattct

SEQ ID NO: 294726 - DNA, 25 bp, probe
tttccagtgtgacccagataattct

SEQ ID NO: 294727 - DNA, 25 bp, probe
tttcctgaggatccatcatatagtt

SEQ ID NO: 294728 - DNA, 25 bp, probe
tttcctcaggcacatcatttttatc

SEQ ID NO: 294729 - DNA, 25 bp, probe
tttcctcaccatccttttgttgaaa

SEQ ID NO: 294730 - DNA, 25 bp, probe
tttccttgccttgttgatgtggaca

SEQ ID NO: 294731 - DNA, 25 bp, probe
tttccttgccttggttgatttggtt

SEQ ID NO: 294732 - DNA, 25 bp, probe
tttctctctgccaatgtgatgtata

SEQ ID NO: 294733 - DNA, 25 bp, probe
tttctcctgctgaagcggaatatct

SEQ ID NO: 294734 - DNA, 25 bp, probe
tttcccttgctagtgtgcagatatt

SEQ ID NO: 294735 - DNA, 25 bp, probe
tttctgctcttccacaccagataat

SEQ ID NO: 294736 - DNA, 25 bp, probe
tttcccatttaagaataatcgttat

SEQ ID NO: 294737 - DNA, 25 bp, probe
tttccattttattcaagaaatctgt

SEQ ID NO: 294738 - DNA, 25 bp, probe
tttccacttaagacaaagccttgtc

SEQ ID NO: 294739 - DNA, 25 bp, probe
tttacactgccaaaacaatgcccgt

SEQ ID NO: 294740 - DNA, 25 bp, probe
tttcagcacgccgtaaccaggggct

SEQ ID NO: 294741 - DNA, 25 bp, probe
tttacatcggagcacaccgagggct

SEQ ID NO: 294742 - DNA, 25 bp, probe
tttcttgggagagtcactccagccc

SEQ ID NO: 294743 - DNA, 25 bp, probe
tttatagccgagtttctcacacctg

SEQ ID NO: 294744 - DNA, 25 bp, probe
tttatgggagagattagacactgga

SEQ ID NO: 294745 - DNA, 25 bp, probe
tttatctacggatttagaatgtggt

SEQ ID NO: 294746 - DNA, 25 bp, probe
tttaaacctcaagtaacatctgaga

SEQ ID NO: 294747 - DNA, 25 bp, probe
tttatttgcctctactacgtcaggc

SEQ ID NO: 294748 - DNA, 25 bp, probe
tttatttttaggtacattaggcaag

SEQ ID NO: 294749 - DNA, 25 bp, probe
tttcattttgcactgaggatattca

SEQ ID NO: 294750 - DNA, 25 bp, probe
tttctgtgtgtgcctcacgaaatgg

SEQ ID NO: 294751 - DNA, 25 bp, probe
tttcatgctttgctccgaacaaata

SEQ ID NO: 294752 - DNA, 25 bp, probe
tttcactagcgtacatctaaggaaa

SEQ ID NO: 294753 - DNA, 25 bp, probe
tttcactcaactttccaagggaaat

SEQ ID NO: 294754 - DNA, 25 bp, probe
tttcactcaactttccaagggaaat

SEQ ID NO: 294755 - DNA, 25 bp, probe
tttcctattcttccaaatgagatga

SEQ ID NO: 294756 - DNA, 25 bp, probe
tttcctatcgtgccgcactagagta

SEQ ID NO: 294757 - DNA, 25 bp, probe
tttctcctggagtccactatgaatg

SEQ ID NO: 294758 - DNA, 25 bp, probe
ttaccttggactgagccagaatgtg

SEQ ID NO: 294759 - DNA, 25 bp, probe
tttccttcatacccagcgcaaaggc

SEQ ID NO: 294760 - DNA, 25 bp, probe
ttgtgcagcttcgaggacaggaaag

SEQ ID NO: 294761 - DNA, 25 bp, probe
ttatgactcatcggtcagcagaaaa

SEQ ID NO: 294762 - DNA, 25 bp, probe
tttatcgtagagtgcagagccaagc

SEQ ID NO: 294763 - DNA, 25 bp, probe
tttatcgtagagtgcagagccaagc

SEQ ID NO: 294764 - DNA, 25 bp, probe
tttacgtgaaggacactccaagctg

SEQ ID NO: 294765 - DNA, 25 bp, probe
tttaggataaggggtcatcaatgct

SEQ ID NO: 294766 - DNA, 25 bp, probe
tttcaataccggagatcatgcaagc

SEQ ID NO: 294767 - DNA, 25 bp, probe
tttacaagccgcaaaggcagcaggc

SEQ ID NO: 294768 - DNA, 25 bp, probe
ttttcacagacctacgggatggcat

SEQ ID NO: 294769 - DNA, 25 bp, probe
tttaccgaccaccagaggctgatga

SEQ ID NO: 294770 - DNA, 25 bp, probe
tttaccgaccaccagaggctgatga

SEQ ID NO: 294771 - DNA, 25 bp, probe
tttcatccaaaaccatgagtgttgg

SEQ ID NO: 294772 - DNA, 25 bp, probe
tttctccacaaaggccctggtggtt

SEQ ID NO: 294773 - DNA, 25 bp, probe
tttccccatcgagactgtggtgtgc

SEQ ID NO: 294774 - DNA, 25 bp, probe
tttacacccgatccactggggagca

SEQ ID NO: 294775 - DNA, 25 bp, probe
tttaacgaggatccattggagggca

SEQ ID NO: 294776 - DNA, 25 bp, probe
tttaaagaggattctcataaggaaa

SEQ ID NO: 294777 - DNA, 25 bp, probe
ttaaaagctgcctagccagaagggt

SEQ ID NO: 294778 - DNA, 25 bp, probe
tttaagactcttaggcagctatggg

SEQ ID NO: 294779 - DNA, 25 bp, probe
tttaagactcttaggcagctatggg

SEQ ID NO: 294780 - DNA, 25 bp, probe
tttaagactcttaggcagctatggg

SEQ ID NO: 294781 - DNA, 25 bp, probe
tttaaaggctttgactctggtggaa

SEQ ID NO: 294782 - DNA, 25 bp, probe
tttatacggcttttttgctggtcag

SEQ ID NO: 294783 - DNA, 25 bp, probe
tttctaccttcttatttgtaataga

SEQ ID NO: 294784 - DNA, 25 bp, probe
tttctgacactttcacttttgcaga

SEQ ID NO: 294785 - DNA, 25 bp, probe
tttctgcacagttaagtttatgaga

SEQ ID NO: 294786 - DNA, 25 bp, probe
tttcaatatgtacagaattcatgga

SEQ ID NO: 294787 - DNA, 25 bp, probe
tttcaagaggaacatatgcctgaga

SEQ ID NO: 294788 - DNA, 25 bp, probe
tttacagggtcactaactctggagt

SEQ ID NO: 294789 - DNA, 25 bp, probe
tttatcgggttgattgccgaagtga

SEQ ID NO: 294790 - DNA, 25 bp, probe
tttagggatttgcttgggatacaga

SEQ ID NO: 294791 - DNA, 25 bp, probe
tttagtggtttctttggtcttgagc

SEQ ID NO: 294792 - DNA, 25 bp, probe
tttcttttgctttatgggtttggct

SEQ ID NO: 294793 - DNA, 25 bp, probe
tttcttcatgtgtgtttagtatctg

SEQ ID NO: 294794 - DNA, 25 bp, probe
tttcctatcgcagtgtttcagttct

SEQ ID NO: 294795 - DNA, 25 bp, probe
tttcctgtgccaggtatacgcgttc

SEQ ID NO: 294796 - DNA, 25 bp, probe
tttctgcttccaggtcaggagcagc

SEQ ID NO: 294797 - DNA, 25 bp, probe
tttctgtgcagccactgttaagcca

SEQ ID NO: 294798 - DNA, 25 bp, probe
ttatatgattcacatgctaaagcca

SEQ ID NO: 294799 - DNA, 25 bp, probe
tttcagttgcagtagtatcaaatga

SEQ ID NO: 294800 - DNA, 25 bp, probe
tttctctccatgtgctatatgaatg

SEQ ID NO: 294801 - DNA, 25 bp, probe
tttctttcttagcttgcaatgctat

SEQ ID NO: 294802 - DNA, 25 bp, probe
tttctactgctaggcaattgaagta

SEQ ID NO: 294803 - DNA, 25 bp, probe
tttctttgcaatgcattgtatggct

SEQ ID NO: 294804 - DNA, 25 bp, probe
tttctcttctatgctgtgacagctt

SEQ ID NO: 294805 - DNA, 25 bp, probe
tttctctcctttatgatcagtgata

SEQ ID NO: 294806 - DNA, 25 bp, probe
tttctagacttgtgctgatcgtgct

SEQ ID NO: 294807 - DNA, 25 bp, probe
ttttacacgagattgctgtgcttga

SEQ ID NO: 294808 - DNA, 25 bp, probe
tttctcctgctgattgtgtgtgtga

SEQ ID NO: 294809 - DNA, 25 bp, probe
tttctcctgctgattgtgtgtgtga

SEQ ID NO: 294810 - DNA, 25 bp, probe
tttccctcaggactgggtgtgacca

SEQ ID NO: 294811 - DNA, 25 bp, probe
ttatctttatggtgggctgtgactc

SEQ ID NO: 294812 - DNA, 25 bp, probe
tttcttttgtgctggtcttgcaagt

SEQ ID NO: 294813 - DNA, 25 bp, probe
ttccggtatggctggtgcaaaagct

SEQ ID NO: 294814 - DNA, 25 bp, probe
tttcgaggaggctgtggccaccaac

SEQ ID NO: 294815 - DNA, 25 bp, probe
tttaaggaggcgctggcaagcccga

SEQ ID NO: 294816 - DNA, 25 bp, probe
tttaagtgcaatacttggcccaccg

SEQ ID NO: 294817 - DNA, 25 bp, probe
tttcaattgacaattctgcctcctc

SEQ ID NO: 294818 - DNA, 25 bp, probe
tttcagtttatcatcgttgactctt

SEQ ID NO: 294819 - DNA, 25 bp, probe
tttcagaattccatatttgcacaat

SEQ ID NO: 294820 - DNA, 25 bp, probe
tttacatgtatcggtctttcaacta

SEQ ID NO: 294821 - DNA, 25 bp, probe
tttactgtgtgctgtaactctccaa

SEQ ID NO: 294822 - DNA, 25 bp, probe
ttatttttaggtctctgtccattgc

SEQ ID NO: 294823 - DNA, 25 bp, probe
tttcttattatgttggtttccttgt

SEQ ID NO: 294824 - DNA, 25 bp, probe
tttctttctaaattgctgttcctta

SEQ ID NO: 294825 - DNA, 25 bp, probe
tttcccctataattgtgctgttttt

SEQ ID NO: 294826 - DNA, 25 bp, probe
tttcccctagcctagggtcccatat

SEQ ID NO: 294827 - DNA, 25 bp, probe
ttggccccaactgaggacccaatat

SEQ ID NO: 294828 - DNA, 25 bp, probe
ttggccccaactgaggacccaatat

SEQ ID NO: 294829 - DNA, 25 bp, probe
ttagcccaaactgagtacaacttaa

SEQ ID NO: 294830 - DNA, 25 bp, probe
ttaccacaccacgaagaacaagctt

SEQ ID NO: 294831 - DNA, 25 bp, probe
ttaccacaccacgaagaacaagctt

SEQ ID NO: 294832 - DNA, 25 bp, probe
tttcatcctcgagacaggacaagat

SEQ ID NO: 294833 - DNA, 25 bp, probe
tttctgtctcccaagaggaaatgtg

SEQ ID NO: 294834 - DNA, 25 bp, probe
tttcctcttcctggatctgagaatt

SEQ ID NO: 294835 - DNA, 25 bp, probe
ttatcctgtggcgttgcctggacat

SEQ ID NO: 294836 - DNA, 25 bp, probe
ttatcctgtggcgttgcctggacat

SEQ ID NO: 294837 - DNA, 25 bp, probe
tttttgtgatccttccgaagtcctg

SEQ ID NO: 294838 - DNA, 25 bp, probe
tttctgtggtactcctaattacatt

SEQ ID NO: 294839 - DNA, 25 bp, probe
tttctcaggaactcagtttaactat

SEQ ID NO: 294840 - DNA, 25 bp, probe
tttctaggtacatcaatttcacatc

SEQ ID NO: 294841 - DNA, 25 bp, probe
ttttaggcattacattttccacaac

SEQ ID NO: 294842 - DNA, 25 bp, probe
ttactaggacaaccaatatttccag

SEQ ID NO: 294843 - DNA, 25 bp, probe
tttctaggattccaccaagtcccag

SEQ ID NO: 294844 - DNA, 25 bp, probe
tttctaggattccaccaagtcccag

SEQ ID NO: 294845 - DNA, 25 bp, probe
tttcaagacacagacaaagtcccgt

SEQ ID NO: 294846 - DNA, 25 bp, probe
ttgtcagaataagaaacgtggccct

SEQ ID NO: 294847 - DNA, 25 bp, probe
ttgtcagaataagaaacgtggccct

SEQ ID NO: 294848 - DNA, 25 bp, probe
ttttgtgccaagaaaccctggacct

SEQ ID NO: 294849 - DNA, 25 bp, probe
tttcttcaaacaaaacccagctcct

SEQ ID NO: 294850 - DNA, 25 bp, probe
tttctactacatctaatgaccacat

SEQ ID NO: 294851 - DNA, 25 bp, probe
tttctcagttctacttatgacacct

SEQ ID NO: 294852 - DNA, 25 bp, probe
tttctcatgttaatttctcagcccc

SEQ ID NO: 294853 - DNA, 25 bp, probe
ttttccatttcagtgattcccaccc

SEQ ID NO: 294854 - DNA, 25 bp, probe
ttttcaattccaaactcttaaccag

SEQ ID NO: 294855 - DNA, 25 bp, probe
ttgtctctttcctacaagttaacca

SEQ ID NO: 294856 - DNA, 25 bp, probe
tttctctcttactaacagtttcatc

SEQ ID NO: 294857 - DNA, 25 bp, probe
tttcctctctgtggaatcctattct

SEQ ID NO: 294858 - DNA, 25 bp, probe
tttcttctctgctggacaccaattt

SEQ ID NO: 294859 - DNA, 25 bp, probe
tttcctccatatttgtctgccaata

SEQ ID NO: 294860 - DNA, 25 bp, probe
tttcctccatatttgtctgccaata

SEQ ID NO: 294861 - DNA, 25 bp, probe
tttcgtcgccaaatgttgctgacaa

SEQ ID NO: 294862 - DNA, 25 bp, probe
tttctctcctgctaattcctgaaga

SEQ ID NO: 294863 - DNA, 25 bp, probe
tttctaaccatactcatcaccatta

SEQ ID NO: 294864 - DNA, 25 bp, probe
tttctgacctcatataacacattat

SEQ ID NO: 294865 - DNA, 25 bp, probe
tttctactccaattaagaatatata

SEQ ID NO: 294866 - DNA, 25 bp, probe
tttctgtgcgcttacccagaattct

SEQ ID NO: 294867 - DNA, 25 bp, probe
ttccttactaacccagagacttcag

SEQ ID NO: 294868 - DNA, 25 bp, probe
ttttttaaaatgtctagaattcagg

SEQ ID NO: 294869 - DNA, 25 bp, probe
ttctaccgagaattaaaacttcaga

SEQ ID NO: 294870 - DNA, 25 bp, probe
tttaagcggatatcgggcacctcca

SEQ ID NO: 294871 - DNA, 25 bp, probe
ttccaacgagaagcggcactcctac

SEQ ID NO: 294872 - DNA, 25 bp, probe
tttaactgagactccgaccagctca

SEQ ID NO: 294873 - DNA, 25 bp, probe
tttaactggatctcttggccacaga

SEQ ID NO: 294874 - DNA, 25 bp, probe
tttaaatggtcttcatgccccacat

SEQ ID NO: 294875 - DNA, 25 bp, probe
tttaaatggtcttcatgccccacat

SEQ ID NO: 294876 - DNA, 25 bp, probe
tttacagatttcctgatcccgatgt

SEQ ID NO: 294877 - DNA, 25 bp, probe
tttcagaaattgccagtgtcctggt

SEQ ID NO: 294878 - DNA, 25 bp, probe
tttcataaaccctggcactggtcac

SEQ ID NO: 294879 - DNA, 25 bp, probe
tttcaaaaacccacattgtccacaa

SEQ ID NO: 294880 - DNA, 25 bp, probe
tttaaaacacaccagccataaaaca

SEQ ID NO: 294881 - DNA, 25 bp, probe
tttactaactaccagcattgagaac

SEQ ID NO: 294882 - DNA, 25 bp, probe
tttaatgaatcatcggcttggtact

SEQ ID NO: 294883 - DNA, 25 bp, probe
tttaagaacaccagcttgcaggatt

SEQ ID NO: 294884 - DNA, 25 bp, probe
tttacgcaggacattcttgccgtat

SEQ ID NO: 294885 - DNA, 25 bp, probe
tttcacgcagtccattttcatttgt

SEQ ID NO: 294886 - DNA, 25 bp, probe
tttcacagcagtttattaatgtata

SEQ ID NO: 294887 - DNA, 25 bp, probe
tttcacaccatcttagatataatta

SEQ ID NO: 294888 - DNA, 25 bp, probe
tttcatatccaacgacagaagcatt

SEQ ID NO: 294889 - DNA, 25 bp, probe
tttcttctagtggacagaacatgct

SEQ ID NO: 294890 - DNA, 25 bp, probe
tttcccgatctgggctggagagctt

SEQ ID NO: 294891 - DNA, 25 bp, probe
ttcccccatgtttgggagatcttta

SEQ ID NO: 294892 - DNA, 25 bp, probe
tttccccagatttggtgactcatca

SEQ ID NO: 294893 - DNA, 25 bp, probe
ttttcccgactgtaagcagttctat

SEQ ID NO: 294894 - DNA, 25 bp, probe
tttaccctcctgtaagcaacacttt

SEQ ID NO: 294895 - DNA, 25 bp, probe
tttaacttcctccatacataagctt

SEQ ID NO: 294896 - DNA, 25 bp, probe
tttatctttccccatatccaagtac

SEQ ID NO: 294897 - DNA, 25 bp, probe
ttttttcccaccaaacaagtatgca

SEQ ID NO: 294898 - DNA, 25 bp, probe
tttcctgtccactgaaacaaatgag

SEQ ID NO: 294899 - DNA, 25 bp, probe
tttccctggcactcaaacagaataa

SEQ ID NO: 294900 - DNA, 25 bp, probe
tttaccgccagatgaaatcgaacag

SEQ ID NO: 294901 - DNA, 25 bp, probe
tttagctcccattcagaaactgcaa

SEQ ID NO: 294902 - DNA, 25 bp, probe
tttagtactcaaggcaaaccagcaa

SEQ ID NO: 294903 - DNA, 25 bp, probe
tttagtactcaaggcaaaccagcaa

SEQ ID NO: 294904 - DNA, 25 bp, probe
tttcttcacaaattgcaaatccgct

SEQ ID NO: 294905 - DNA, 25 bp, probe
tttcttcacgaaacaaatcccctgt

SEQ ID NO: 294906 - DNA, 25 bp, probe
ttatttcaccaccataaaacccttg

SEQ ID NO: 294907 - DNA, 25 bp, probe
tttttgcccaccagtaatcctgatg

SEQ ID NO: 294908 - DNA, 25 bp, probe
tttttgcccaccagtaatcctgatg

SEQ ID NO: 294909 - DNA, 25 bp, probe
ttgttttgcacagacgtgggcctgg

SEQ ID NO: 294910 - DNA, 25 bp, probe
tttcttttgcatgactgtggcctgt

SEQ ID NO: 294911 - DNA, 25 bp, probe
tttcttttgctggatggttccttta

SEQ ID NO: 294912 - DNA, 25 bp, probe
tttcttttgctggatggttccttta

SEQ ID NO: 294913 - DNA, 25 bp, probe
tttctcttcataggggtcatccttt

SEQ ID NO: 294914 - DNA, 25 bp, probe
tttctttatagccgagtttctcaca

SEQ ID NO: 294915 - DNA, 25 bp, probe
tttcctgtatcgctaatttatcatt

SEQ ID NO: 294916 - DNA, 25 bp, probe
tttcctgtatcgctaatttatcatt

SEQ ID NO: 294917 - DNA, 25 bp, probe
tttctctactgtctcagtttacatt

SEQ ID NO: 294918 - DNA, 25 bp, probe
tttcttactctatagtggcaacatt

SEQ ID NO: 294919 - DNA, 25 bp, probe
tttcttcactcctgggtctatgatg

SEQ ID NO: 294920 - DNA, 25 bp, probe
tttcttcacggcagttctcattagt

SEQ ID NO: 294921 - DNA, 25 bp, probe
tttctacacgagatcctctctctga

SEQ ID NO: 294922 - DNA, 25 bp, probe
tttttaggatgagcctctcctagac

SEQ ID NO: 294923 - DNA, 25 bp, probe
tttaatacgtgagcgtgctaaaagc

SEQ ID NO: 294924 - DNA, 25 bp, probe
tttaactttaccatgctcaatgaaa

SEQ ID NO: 294925 - DNA, 25 bp, probe
tttcaacttctgtgactccagagga

SEQ ID NO: 294926 - DNA, 25 bp, probe
tttaatgtgtgcaaaagcccaaagg

SEQ ID NO: 294927 - DNA, 25 bp, probe
tttaagctgctgaaggaaggacaca

SEQ ID NO: 294928 - DNA, 25 bp, probe
tttaatgtgggcagcatatagaaca

SEQ ID NO: 294929 - DNA, 25 bp, probe
ttttcagtgttgacacttaaaatta

SEQ ID NO: 294930 - DNA, 25 bp, probe
tttcatttctgcacagttaagttta

SEQ ID NO: 294931 - DNA, 25 bp, probe
tttacttctctgtgttaattgtaat

SEQ ID NO: 294932 - DNA, 25 bp, probe
tttttcttgtgctgactaactataa

SEQ ID NO: 294933 - DNA, 25 bp, probe
tttcacttttgcagattgggtaaca

SEQ ID NO: 294934 - DNA, 25 bp, probe
tttacttctgtgggagtgggaactg

SEQ ID NO: 294935 - DNA, 25 bp, probe
ttatcatcctcgtgcgagggagaac

SEQ ID NO: 294936 - DNA, 25 bp, probe
ttatcatcctcgtgcgagggagaac

SEQ ID NO: 294937 - DNA, 25 bp, probe
tttcaccagcgttgtagtacagaag

SEQ ID NO: 294938 - DNA, 25 bp, probe
tttctgtctgtaagcctgattttca

SEQ ID NO: 294939 - DNA, 25 bp, probe
tttcttcttttgggtgtgcttcaat

SEQ ID NO: 294940 - DNA, 25 bp, probe
tttcttcttttgggtgtgcttcaat

SEQ ID NO: 294941 - DNA, 25 bp, probe
ttttgttctattgctagggtaaaat

SEQ ID NO: 294942 - DNA, 25 bp, probe
ttttcgtctattgtaagaattatac

SEQ ID NO: 294943 - DNA, 25 bp, probe
tttttcagtacttctacagaatttt

SEQ ID NO: 294944 - DNA, 25 bp, probe
ttttctgagcattctatgatcacat

SEQ ID NO: 294945 - DNA, 25 bp, probe
tttctccatcatcctgattagcatg

SEQ ID NO: 294946 - DNA, 25 bp, probe
tttctccatcatagaatagcatgcc

SEQ ID NO: 294947 - DNA, 25 bp, probe
tttctcagctataaattgcgctctc

SEQ ID NO: 294948 - DNA, 25 bp, probe
tttatagtatcaaattgtttctaac

SEQ ID NO: 294949 - DNA, 25 bp, probe
tttatactattatttgttacgttca

SEQ ID NO: 294950 - DNA, 25 bp, probe
tttctactgattgtgtcttaagtct

SEQ ID NO: 294951 - DNA, 25 bp, probe
ttttacttacctgcttgaatacttg

SEQ ID NO: 294952 - DNA, 25 bp, probe
ttttaacttctttctatttgacttg

SEQ ID NO: 294953 - DNA, 25 bp, probe
tttctagacaattctctattttact

SEQ ID NO: 294954 - DNA, 25 bp, probe
ttatcaaaaatgacctatgtttagt

SEQ ID NO: 294955 - DNA, 25 bp, probe
ttatcaaaaatgacctatgtttagt

SEQ ID NO: 294956 - DNA, 25 bp, probe
ttatgccaaagtactgttggttcga

SEQ ID NO: 294957 - DNA, 25 bp, probe
tttaaaagttcgtttgttcatgcaa

SEQ ID NO: 294958 - DNA, 25 bp, probe
tttaaaaaatcactcctctccagca

SEQ ID NO: 294959 - DNA, 25 bp, probe
tttagaaaatcactgctccactgcc

SEQ ID NO: 294960 - DNA, 25 bp, probe
tttcaggaagtcttccagcaacccc

SEQ ID NO: 294961 - DNA, 25 bp, probe
ttttggtactttcacagcaccagcc

SEQ ID NO: 294962 - DNA, 25 bp, probe
ttttggtactttcacagcaccagcc

SEQ ID NO: 294963 - DNA, 25 bp, probe
tttctggaagcaatcctaccccagc

SEQ ID NO: 294964 - DNA, 25 bp, probe
tttcaggaacactcatattaccaca

SEQ ID NO: 294965 - DNA, 25 bp, probe
tttcaccaagccttttcataatcaa

SEQ ID NO: 294966 - DNA, 25 bp, probe
tttcacccaatctcttgcaactggt

SEQ ID NO: 294967 - DNA, 25 bp, probe
tttcacccaatctcttgcaactggt

SEQ ID NO: 294968 - DNA, 25 bp, probe
tttcatttcacttatcttgcatatc

SEQ ID NO: 294969 - DNA, 25 bp, probe
tttctttctttgacttgtgactgcc

SEQ ID NO: 294970 - DNA, 25 bp, probe
tttttgtccttgacttgggagccac

SEQ ID NO: 294971 - DNA, 25 bp, probe
tttttccgcgtgtcggaggagcagc

SEQ ID NO: 294972 - DNA, 25 bp, probe
tttttccgcgtgtcggaggagcagc

SEQ ID NO: 294973 - DNA, 25 bp, probe
tttctctccagcctgacttggggag

SEQ ID NO: 294974 - DNA, 25 bp, probe
tttctctccagcctgacttggggag

SEQ ID NO: 294975 - DNA, 25 bp, probe
ttttgctccgctgacatttgggtga

SEQ ID NO: 294976 - DNA, 25 bp, probe
tttttccgctggattgactgggagc

SEQ ID NO: 294977 - DNA, 25 bp, probe
tttttccggcacatgaattgggacg

SEQ ID NO: 294978 - DNA, 25 bp, probe
tttttccggcacatgaattgggacg

SEQ ID NO: 294979 - DNA, 25 bp, probe
tttttccggcacatgaattgggacg

SEQ ID NO: 294980 - DNA, 25 bp, probe
ttttaccgccagatgaaatcgaaca

SEQ ID NO: 294981 - DNA, 25 bp, probe
ttttccctgacgagagtatctgaat

SEQ ID NO: 294982 - DNA, 25 bp, probe
tttaccctactgatgatgtgttgtt

SEQ ID NO: 294983 - DNA, 25 bp, probe
tttaccgaatcattacattgttttg

SEQ ID NO: 294984 - DNA, 25 bp, probe
tttcatccaaatggaattctgtgat

SEQ ID NO: 294985 - DNA, 25 bp, probe
tttacctccagggatcagctgtgtg

SEQ ID NO: 294986 - DNA, 25 bp, probe
tttctcttacttggacagctgttga

SEQ ID NO: 294987 - DNA, 25 bp, probe
tttctcattccaaggacctggatga

SEQ ID NO: 294988 - DNA, 25 bp, probe
tttcttgattaatgtcacgtcagaa

SEQ ID NO: 294989 - DNA, 25 bp, probe
tttctgttctaatgccatagatcaa

SEQ ID NO: 294990 - DNA, 25 bp, probe
tttcttctgctatgtgacttgcatc

SEQ ID NO: 294991 - DNA, 25 bp, probe
tttaatgtgcaatgatggctggatc

SEQ ID NO: 294992 - DNA, 25 bp, probe
tttaatatcaatggactgagtctga

SEQ ID NO: 294993 - DNA, 25 bp, probe
tttaatatcaatggactgagtctga

SEQ ID NO: 294994 - DNA, 25 bp, probe
tttaaatcctcgtatgcactctggc

SEQ ID NO: 294995 - DNA, 25 bp, probe
tttaaatcctcgtatgcactctggc

SEQ ID NO: 294996 - DNA, 25 bp, probe
tttaaacctctgttgcaatctgaag

SEQ ID NO: 294997 - DNA, 25 bp, probe
tttacccacacgtgtcctgaagaca

SEQ ID NO: 294998 - DNA, 25 bp, probe
tttacccaccagagacagtacagaa

SEQ ID NO: 294999 - DNA, 25 bp, probe
ttatacctaccataagaggacgaga

SEQ ID NO: 295000 - DNA, 25 bp, probe
ttttcctactctgcaagtggacgag

SEQ ID NO: 295001 - DNA, 25 bp, probe
tttatcctattctacaagtcagtaa

SEQ ID NO: 295002 - DNA, 25 bp, probe
tttacaggtcattaccagtcattaa

SEQ ID NO: 295003 - DNA, 25 bp, probe
tttcaggttatatccaatagtagag

SEQ ID NO: 295004 - DNA, 25 bp, probe
tttcagctgtttttacatctaaagc

SEQ ID NO: 295005 - DNA, 25 bp, probe
tttcacttatcttgcatatcttaaa

SEQ ID NO: 295006 - DNA, 25 bp, probe
tttcagtatgaacctgtcctaaatc

SEQ ID NO: 295007 - DNA, 25 bp, probe
tttagcatatgcaaatcttttaaca

SEQ ID NO: 295008 - DNA, 25 bp, probe
tttagaagtgcacttatttctgaaa

SEQ ID NO: 295009 - DNA, 25 bp, probe
tttaggagttaatttttgtcagcaa

SEQ ID NO: 295010 - DNA, 25 bp, probe
tttacagcagttaagtttcccagtt

SEQ ID NO: 295011 - DNA, 25 bp, probe
ttttcagcataaacagttgtcctag

SEQ ID NO: 295012 - DNA, 25 bp, probe
tttcattcatcattatcgttgtcct

SEQ ID NO: 295013 - DNA, 25 bp, probe
tttcagtcattttctgcacgcatcc

SEQ ID NO: 295014 - DNA, 25 bp, probe
tttagtcatcgatttatcaatcccg

SEQ ID NO: 295015 - DNA, 25 bp, probe
tttcaaagctcttttcctaactggt

SEQ ID NO: 295016 - DNA, 25 bp, probe
ttgtaaagttcacattctaactgga

SEQ ID NO: 295017 - DNA, 25 bp, probe
tttcaactatttctaccaccgagaa

SEQ ID NO: 295018 - DNA, 25 bp, probe
ttttaacatcttctcccactaggaa

SEQ ID NO: 295019 - DNA, 25 bp, probe
tttattgaccttccatggtcctcac

SEQ ID NO: 295020 - DNA, 25 bp, probe
ttttagaatcttcaagctctcccgc

SEQ ID NO: 295021 - DNA, 25 bp, probe
ttttaagctttgcacatgtccaccc

SEQ ID NO: 295022 - DNA, 25 bp, probe
tttctacacaattgtcactccagcc

SEQ ID NO: 295023 - DNA, 25 bp, probe
tttcacacaggtatgcacggcagct

SEQ ID NO: 295024 - DNA, 25 bp, probe
tttcagcctgtgtttacctgagttg

SEQ ID NO: 295025 - DNA, 25 bp, probe
tttaccttcatttcatcctgttggc

SEQ ID NO: 295026 - DNA, 25 bp, probe
tttaccttattttctcttggaacat

SEQ ID NO: 295027 - DNA, 25 bp, probe
tttaccttttatacctatgttcgat

SEQ ID NO: 295028 - DNA, 25 bp, probe
tttacagttttagggcttgtctcga

SEQ ID NO: 295029 - DNA, 25 bp, probe
ttcagacggttttggatcttactgc

SEQ ID NO: 295030 - DNA, 25 bp, probe
ttcagacggttttggatcttactgc

SEQ ID NO: 295031 - DNA, 25 bp, probe
tttacaggttttagcatcttcttca

SEQ ID NO: 295032 - DNA, 25 bp, probe
tttacaggttttagcatcttcttca

SEQ ID NO: 295033 - DNA, 25 bp, probe
tttcaaggattaattcttcctctac

SEQ ID NO: 295034 - DNA, 25 bp, probe
tttcacagccatgattcttttgccc

SEQ ID NO: 295035 - DNA, 25 bp, probe
tttcatcagccggattttgttattg

SEQ ID NO: 295036 - DNA, 25 bp, probe
tttcacacatcccttcttttgaatg

SEQ ID NO: 295037 - DNA, 25 bp, probe
tttacctactgtgtcttggaatcta

SEQ ID NO: 295038 - DNA, 25 bp, probe
tttaacaactggggccttgcaccct

SEQ ID NO: 295039 - DNA, 25 bp, probe
tttcttttctggggctcttagccct

SEQ ID NO: 295040 - DNA, 25 bp, probe
tttcttggttgggcttttaatcctg

SEQ ID NO: 295041 - DNA, 25 bp, probe
tttcttttagtgtttcattaagcct

SEQ ID NO: 295042 - DNA, 25 bp, probe
ttttttccagagttccattaaatca

SEQ ID NO: 295043 - DNA, 25 bp, probe
tttttatatcggtcccggaagacat

SEQ ID NO: 295044 - DNA, 25 bp, probe
tttaataatgcgctccccaaacaga

SEQ ID NO: 295045 - DNA, 25 bp, probe
tttaataatgcgctccccaaacaga

SEQ ID NO: 295046 - DNA, 25 bp, probe
tttatctcagaccttaaccttacag

SEQ ID NO: 295047 - DNA, 25 bp, probe
tttcatctattacttcacccttgaa

SEQ ID NO: 295048 - DNA, 25 bp, probe
tttctctttcctactcctattaaag

SEQ ID NO: 295049 - DNA, 25 bp, probe
tttcatttacctttccagtatgaaa

SEQ ID NO: 295050 - DNA, 25 bp, probe
ttttttactctatgccccaaatata

SEQ ID NO: 295051 - DNA, 25 bp, probe
ttttttccttagcaacctatcattt

SEQ ID NO: 295052 - DNA, 25 bp, probe
tttttgatttaaccaccctgattca

SEQ ID NO: 295053 - DNA, 25 bp, probe
tttttctttaaggctcccaacaatg

SEQ ID NO: 295054 - DNA, 25 bp, probe
tttttctttaaggctcccaacaatg

SEQ ID NO: 295055 - DNA, 25 bp, probe
tttctgtatatgaaacgctccccgc

SEQ ID NO: 295056 - DNA, 25 bp, probe
tttctctgacacaaactgttcaccc

SEQ ID NO: 295057 - DNA, 25 bp, probe
tttcttcacagctaaatgtatcatc

SEQ ID NO: 295058 - DNA, 25 bp, probe
tttcttcacagctaaatgtatcatc

SEQ ID NO: 295059 - DNA, 25 bp, probe
tttatgctcacacaacagtttcaac

SEQ ID NO: 295060 - DNA, 25 bp, probe
tttatgttaacactcaattgctaga

SEQ ID NO: 295061 - DNA, 25 bp, probe
tttcatatgtttcctcaactgtaca

SEQ ID NO: 295062 - DNA, 25 bp, probe
tttcaagttgtccagacactccaaa

SEQ ID NO: 295063 - DNA, 25 bp, probe
tttcaaccttgccagcatcactggt

SEQ ID NO: 295064 - DNA, 25 bp, probe
tttattcctattcgacactggcttc

SEQ ID NO: 295065 - DNA, 25 bp, probe
tttacatgcctataatatgctggtt

SEQ ID NO: 295066 - DNA, 25 bp, probe
tttacatgcctataatatgctggtt

SEQ ID NO: 295067 - DNA, 25 bp, probe
tttacagcccattaacttgagaatt

SEQ ID NO: 295068 - DNA, 25 bp, probe
tttaccccaaaagccgtgatgtgca

SEQ ID NO: 295069 - DNA, 25 bp, probe
tttcaccaccataaaacccttgagc

SEQ ID NO: 295070 - DNA, 25 bp, probe
tttctcacactcttaatgactttta

SEQ ID NO: 295071 - DNA, 25 bp, probe
tttcttatcctttttgctctttaga

SEQ ID NO: 295072 - DNA, 25 bp, probe
tttttgacggtatttcctatgcgaa

SEQ ID NO: 295073 - DNA, 25 bp, probe
tttctgtaagtttttcctcatggct

SEQ ID NO: 295074 - DNA, 25 bp, probe
tttctgtatagttttcacctctgag

SEQ ID NO: 295075 - DNA, 25 bp, probe
tttcttatgagttttctaatcatag

SEQ ID NO: 295076 - DNA, 25 bp, probe
tttctagtagcttctctaacaaaac

SEQ ID NO: 295077 - DNA, 25 bp, probe
ttttcaggtttcttaaaaacagctg

SEQ ID NO: 295078 - DNA, 25 bp, probe
ttttccgaaactacagttaaagcag

SEQ ID NO: 295079 - DNA, 25 bp, probe
ttttaccaaaagagtatcaaggcca

SEQ ID NO: 295080 - DNA, 25 bp, probe
ttttcccaaaagatggtatatacca

SEQ ID NO: 295081 - DNA, 25 bp, probe
tttctcctagaatgctgttgtaaat

SEQ ID NO: 295082 - DNA, 25 bp, probe
tttctcttagtcttcttatttaatt

SEQ ID NO: 295083 - DNA, 25 bp, probe
tttctaaattgctgttccttaattt

SEQ ID NO: 295084 - DNA, 25 bp, probe
ttactattattgttcccctaagtgg

SEQ ID NO: 295085 - DNA, 25 bp, probe
tttctttttagtgtcttatcagtgg

SEQ ID NO: 295086 - DNA, 25 bp, probe
tttcttcttacgctgtgttaatgtg

SEQ ID NO: 295087 - DNA, 25 bp, probe
tttttattactagtgtttaagtcat

SEQ ID NO: 295088 - DNA, 25 bp, probe
tttcttaaactttgtatctctagga

SEQ ID NO: 295089 - DNA, 25 bp, probe
tttctgctactactttgtcatcaaa

SEQ ID NO: 295090 - DNA, 25 bp, probe
tttctgctactactttgtcatcaaa

SEQ ID NO: 295091 - DNA, 25 bp, probe
tttcttactatcattgcctaaagga

SEQ ID NO: 295092 - DNA, 25 bp, probe
tttcttactatcattgcctaaagga

SEQ ID NO: 295093 - DNA, 25 bp, probe
tttctatttattgtaccaaagacag

SEQ ID NO: 295094 - DNA, 25 bp, probe
tttctttgtagtgtcccagctaagg

SEQ ID NO: 295095 - DNA, 25 bp, probe
tttctttgaagagcccatcctcaca

SEQ ID NO: 295096 - DNA, 25 bp, probe
tttctttgaagagcccatcctcaca

SEQ ID NO: 295097 - DNA, 25 bp, probe
tttttgtaagtatcacctgccacca

SEQ ID NO: 295098 - DNA, 25 bp, probe
tttaatgtacgttacagctttcaca

SEQ ID NO: 295099 - DNA, 25 bp, probe
tttactgtaccttactattcctgac

SEQ ID NO: 295100 - DNA, 25 bp, probe
tttactgatatggttcttattcact

SEQ ID NO: 295101 - DNA, 25 bp, probe
tttatgtgatgtgtattccattccg

SEQ ID NO: 295102 - DNA, 25 bp, probe
tttagtgtgcttaattttaccaggc

SEQ ID NO: 295103 - DNA, 25 bp, probe
tttagtgtgcttaattttaccaggc

SEQ ID NO: 295104 - DNA, 25 bp, probe
tttaggccattcttgatggaaccag

SEQ ID NO: 295105 - DNA, 25 bp, probe
tttaagactctgttgatgtgataat

SEQ ID NO: 295106 - DNA, 25 bp, probe
tttacaatctatcatgagtattatt

SEQ ID NO: 295107 - DNA, 25 bp, probe
tttcacatatgtaggtattcatttt

SEQ ID NO: 295108 - DNA, 25 bp, probe
ttacatcatgagtggactttgcatt

SEQ ID NO: 295109 - DNA, 25 bp, probe
tttaagatgttggacttctgcaata

SEQ ID NO: 295110 - DNA, 25 bp, probe
tttcaggatatttgacctgtcatta

SEQ ID NO: 295111 - DNA, 25 bp, probe
tttaggtagtagaatctcagcactt

SEQ ID NO: 295112 - DNA, 25 bp, probe
tttcatggatagggagagctcctct

SEQ ID NO: 295113 - DNA, 25 bp, probe
tttcattgtcactcaactgccttat

SEQ ID NO: 295114 - DNA, 25 bp, probe
tttcagttcatatgcagaacgtatt

SEQ ID NO: 295115 - DNA, 25 bp, probe
tttcatgttaattctgacagttcac

SEQ ID NO: 295116 - DNA, 25 bp, probe
tttttctcatagttaatttcatctc

SEQ ID NO: 295117 - DNA, 25 bp, probe
tttagcctcttgggatacattcttc

SEQ ID NO: 295118 - DNA, 25 bp, probe
tttactgctaatgaggacattcgtc

SEQ ID NO: 295119 - DNA, 25 bp, probe
ttctaccaacgccaggacgtggcgc

SEQ ID NO: 295120 - DNA, 25 bp, probe
ttttgccaatcccagggcaggggct

SEQ ID NO: 295121 - DNA, 25 bp, probe
ttttgccaatcccagggcaggggct

SEQ ID NO: 295122 - DNA, 25 bp, probe
ttttgcaactatgacggtggggatt

SEQ ID NO: 295123 - DNA, 25 bp, probe
ttttggaatttaccggctgagagat

SEQ ID NO: 295124 - DNA, 25 bp, probe
ttttcgaatttatcagtgcaagagg

SEQ ID NO: 295125 - DNA, 25 bp, probe
ttttccacatagcaatcatgttaag

SEQ ID NO: 295126 - DNA, 25 bp, probe
ttttcaatcaagctgtgtgcttaat

SEQ ID NO: 295127 - DNA, 25 bp, probe
tttaaacatcatttgttcttcagta

SEQ ID NO: 295128 - DNA, 25 bp, probe
tttcaagaagcaattgattttattg

SEQ ID NO: 295129 - DNA, 25 bp, probe
tttcaggacatgctatcttctattt

SEQ ID NO: 295130 - DNA, 25 bp, probe
tttcatggaacctatgtttatttct

SEQ ID NO: 295131 - DNA, 25 bp, probe
tttcttactgccgattgcttattac

SEQ ID NO: 295132 - DNA, 25 bp, probe
tttcttacatcagatgtttctttgc

SEQ ID NO: 295133 - DNA, 25 bp, probe
tttcacctccaggcagtttcttaca

SEQ ID NO: 295134 - DNA, 25 bp, probe
tttacatctaatgctttgccattga

SEQ ID NO: 295135 - DNA, 25 bp, probe
tttacatctaatgctttgccattga

SEQ ID NO: 295136 - DNA, 25 bp, probe
tttctcattactgtctgtggctaag

SEQ ID NO: 295137 - DNA, 25 bp, probe
tttctcattactgtctgtggctaag

SEQ ID NO: 295138 - DNA, 25 bp, probe
tttcaattacatgttgcttccagac

SEQ ID NO: 295139 - DNA, 25 bp, probe
tttcatttactatatcttcgacagc

SEQ ID NO: 295140 - DNA, 25 bp, probe
tttcatttttagcacttctcaccag

SEQ ID NO: 295141 - DNA, 25 bp, probe
tttcatcttctgttggtttccaaac

SEQ ID NO: 295142 - DNA, 25 bp, probe
tttatctgttaactattatccaaac

SEQ ID NO: 295143 - DNA, 25 bp, probe
tttattgttatattacttgcctatc

SEQ ID NO: 295144 - DNA, 25 bp, probe
tttattgttatattacttgcctatc

SEQ ID NO: 295145 - DNA, 25 bp, probe
tttagtataatatgcagttcctgtg

SEQ ID NO: 295146 - DNA, 25 bp, probe
tttcatctaatttaatattcctggc

SEQ ID NO: 295147 - DNA, 25 bp, probe
tttcattttctctagtatccttggt

SEQ ID NO: 295148 - DNA, 25 bp, probe
tttcttgtttataatacattgtgtt

SEQ ID NO: 295149 - DNA, 25 bp, probe
tttctcttttgcagtttgctgcttt

SEQ ID NO: 295150 - DNA, 25 bp, probe
tttctcttctctgttgtaggttttg

SEQ ID NO: 295151 - DNA, 25 bp, probe
ttttcacctccatttcttggttttg

SEQ ID NO: 295152 - DNA, 25 bp, probe
tttctctttcacattcttgtatttt

SEQ ID NO: 295153 - DNA, 25 bp, probe
tttctatattatactctttaattag

SEQ ID NO: 295154 - DNA, 25 bp, probe
tttctagcagatgcctcttgtttta

SEQ ID NO: 295155 - DNA, 25 bp, probe
tttaagtatccagtagtgatttgta

SEQ ID NO: 295156 - DNA, 25 bp, probe
tttaagtatacattcagtagtgtta

SEQ ID NO: 295157 - DNA, 25 bp, probe
tttaagtatacattcagtagtgtta

SEQ ID NO: 295158 - DNA, 25 bp, probe
ttgtaaatatccttcgggctttgtt

SEQ ID NO: 295159 - DNA, 25 bp, probe
tttacaattgcctgggctccttgaa

SEQ ID NO: 295160 - DNA, 25 bp, probe
tttaagcttcaccaatgctgctcct

SEQ ID NO: 295161 - DNA, 25 bp, probe
tttcatagactacactgtccctggg

SEQ ID NO: 295162 - DNA, 25 bp, probe
tttcaaggcgaagctggcggcggag

SEQ ID NO: 295163 - DNA, 25 bp, probe
tttcaaggcgaagctggcggcggag

SEQ ID NO: 295164 - DNA, 25 bp, probe
tttaagtgcgcctgtgtgcgcgggt

SEQ ID NO: 295165 - DNA, 25 bp, probe
tttaggtgcctctacttgggagcgg

SEQ ID NO: 295166 - DNA, 25 bp, probe
tttaggtgcctctacttgggagcgg

SEQ ID NO: 295167 - DNA, 25 bp, probe
tttagggatctagctcttcgagtgg

SEQ ID NO: 295168 - DNA, 25 bp, probe
tttaggaacatatgctcatttgaga

SEQ ID NO: 295169 - DNA, 25 bp, probe
tttcaaggactcactcttagaaaca

SEQ ID NO: 295170 - DNA, 25 bp, probe
tttcaattatccattcttataagaa

SEQ ID NO: 295171 - DNA, 25 bp, probe
tttctttttctttcttcataaagat

SEQ ID NO: 295172 - DNA, 25 bp, probe
ttctttccttttgcaacaagacaaa

SEQ ID NO: 295173 - DNA, 25 bp, probe
tttcttgcgttcatccataccaaca

SEQ ID NO: 295174 - DNA, 25 bp, probe
tttattgcctctgtcttaaagaatt

SEQ ID NO: 295175 - DNA, 25 bp, probe
tttcatttgcttaactgtaaaccat

SEQ ID NO: 295176 - DNA, 25 bp, probe
tttcatttgcttaactgtaaaccat

SEQ ID NO: 295177 - DNA, 25 bp, probe
ttatatttatttttgtaacaccagt

SEQ ID NO: 295178 - DNA, 25 bp, probe
tttagtttgttccttaacatacaca

SEQ ID NO: 295179 - DNA, 25 bp, probe
tttagcttcgtttttggagccacaa

SEQ ID NO: 295180 - DNA, 25 bp, probe
tttacattcggttgttctgtgctcc

SEQ ID NO: 295181 - DNA, 25 bp, probe
tttatcaacaggtgctgctactccc

SEQ ID NO: 295182 - DNA, 25 bp, probe
tttagaactgtgttctcaccttccc

SEQ ID NO: 295183 - DNA, 25 bp, probe
tttagacagttactcaacatccccc

SEQ ID NO: 295184 - DNA, 25 bp, probe
tttcacaagtctcctagacactccc

SEQ ID NO: 295185 - DNA, 25 bp, probe
ttacgccgctttctgacactttcac

SEQ ID NO: 295186 - DNA, 25 bp, probe
tttacgccgctttctgacactttca

SEQ ID NO: 295187 - DNA, 25 bp, probe
tttagcgaggtggcctacatgttta

SEQ ID NO: 295188 - DNA, 25 bp, probe
tttacgagatgtggctcttcgttgt

SEQ ID NO: 295189 - DNA, 25 bp, probe
tttaaatatgcaggccttcgtggct

SEQ ID NO: 295190 - DNA, 25 bp, probe
tttcacacctcaggctcgtggtggt

SEQ ID NO: 295191 - DNA, 25 bp, probe
ttataaccctacagaggtggtgagc

SEQ ID NO: 295192 - DNA, 25 bp, probe
tttataacagtgccttaaggtatga

SEQ ID NO: 295193 - DNA, 25 bp, probe
ttgcaggacaagagatttaagaatc

SEQ ID NO: 295194 - DNA, 25 bp, probe
ttgaagctccgagcacttaaagtca

SEQ ID NO: 295195 - DNA, 25 bp, probe
tttcagcctcaagctttacacagct

SEQ ID NO: 295196 - DNA, 25 bp, probe
tttcatggccggttttatcagcagt

SEQ ID NO: 295197 - DNA, 25 bp, probe
ttactgtggcagctttgcttacgct

SEQ ID NO: 295198 - DNA, 25 bp, probe
ttccgggagtggatcttccaggcca

SEQ ID NO: 295199 - DNA, 25 bp, probe
ttctcggagacgtttttctacctca

SEQ ID NO: 295200 - DNA, 25 bp, probe
tttcatgggagctcttttctgatcc

SEQ ID NO: 295201 - DNA, 25 bp, probe
tttatggttcatgttatatcctccc

SEQ ID NO: 295202 - DNA, 25 bp, probe
ttctaaggaagacttatctcctgcc

SEQ ID NO: 295203 - DNA, 25 bp, probe
ttttcaggaaacaatcaccttgctc

SEQ ID NO: 295204 - DNA, 25 bp, probe
ttttcaataaacaagatcgtcagga

SEQ ID NO: 295205 - DNA, 25 bp, probe
ttttaaaaacacatgcgcgcgcaca

SEQ ID NO: 295206 - DNA, 25 bp, probe
ttttcttaagtgccaatgggcccac

SEQ ID NO: 295207 - DNA, 25 bp, probe
ttttcctaaacctgggctccagcat

SEQ ID NO: 295208 - DNA, 25 bp, probe
ttttcctaatagttggggcttatat

SEQ ID NO: 295209 - DNA, 25 bp, probe
ttattactaactctgggattttcat

SEQ ID NO: 295210 - DNA, 25 bp, probe
tttcttcttacaaatggagattttt

SEQ ID NO: 295211 - DNA, 25 bp, probe
ttttacttgacaacaaggattcctg

SEQ ID NO: 295212 - DNA, 25 bp, probe
tttttccagcccgaaggatctgtcc

SEQ ID NO: 295213 - DNA, 25 bp, probe
tttttcacctgtacaaggaatacta

SEQ ID NO: 295214 - DNA, 25 bp, probe
ttttttaatggcaataggacattgt

SEQ ID NO: 295215 - DNA, 25 bp, probe
tttctttccaggcatagcagttctt

SEQ ID NO: 295216 - DNA, 25 bp, probe
tttcattgtggccctgaaggttctc

SEQ ID NO: 295217 - DNA, 25 bp, probe
tttactattgcgactaactttctgc

SEQ ID NO: 295218 - DNA, 25 bp, probe
tttactattgcgactaactttctgc

SEQ ID NO: 295219 - DNA, 25 bp, probe
tttagtttcctccatatttgtctgc

SEQ ID NO: 295220 - DNA, 25 bp, probe
tttagtttcctccatatttgtctgc

SEQ ID NO: 295221 - DNA, 25 bp, probe
ttacgcttgcccagagatcttacga

SEQ ID NO: 295222 - DNA, 25 bp, probe
ttacgcttgcccagagatcttacga

SEQ ID NO: 295223 - DNA, 25 bp, probe
ttagagatttccagagtcttacatt

SEQ ID NO: 295224 - DNA, 25 bp, probe
tttaacttctgcagtgccttcacta

SEQ ID NO: 295225 - DNA, 25 bp, probe
tttcatacctctacatgtctgcttg

SEQ ID NO: 295226 - DNA, 25 bp, probe
tttcttctgctctaattcgtgctat

SEQ ID NO: 295227 - DNA, 25 bp, probe
tttcttttcataatccacttactcc

SEQ ID NO: 295228 - DNA, 25 bp, probe
gagttcattgatttggttgatttgt

SEQ ID NO: 295229 - DNA, 25 bp, probe
tttcatgtgatctattactctgaca

SEQ ID NO: 295230 - DNA, 25 bp, probe
tttcatgtgatctattactctgaca

SEQ ID NO: 295231 - DNA, 25 bp, probe
tttcttgtctggagtctgcacatag

SEQ ID NO: 295232 - DNA, 25 bp, probe
ttttgatgtctccaagtagtccacc

SEQ ID NO: 295233 - DNA, 25 bp, probe
tttacatgttccaatatgattccac

SEQ ID NO: 295234 - DNA, 25 bp, probe
tttaagttctcatcattattacata

SEQ ID NO: 295235 - DNA, 25 bp, probe
tttcaggtttgccaagtactacaga

SEQ ID NO: 295236 - DNA, 25 bp, probe
tttaggtcactgatggtcactccga

SEQ ID NO: 295237 - DNA, 25 bp, probe
tttaggtcactgatggtcactccga

SEQ ID NO: 295238 - DNA, 25 bp, probe
tttacggcgctaaggatgactctgg

SEQ ID NO: 295239 - DNA, 25 bp, probe
tttactgtcccaaatgtgagattgc

SEQ ID NO: 295240 - DNA, 25 bp, probe
ttttcttcctcaccaatgacattct

SEQ ID NO: 295241 - DNA, 25 bp, probe
tttattacttcccaatatttctaga

SEQ ID NO: 295242 - DNA, 25 bp, probe
ttaaatcctcccacatttcttggat

SEQ ID NO: 295243 - DNA, 25 bp, probe
tttattcctcccacaggaagaaatg

SEQ ID NO: 295244 - DNA, 25 bp, probe
ttggattccttggtggaggaaaata

SEQ ID NO: 295245 - DNA, 25 bp, probe
ttggatcgcccgagtgggacgatta

SEQ ID NO: 295246 - DNA, 25 bp, probe
tttatggcctggagagcgtgagcta

SEQ ID NO: 295247 - DNA, 25 bp, probe
ttttggctggtgagagtgtggctac

SEQ ID NO: 295248 - DNA, 25 bp, probe
ttagttcaggttgacttgtgtcctt

SEQ ID NO: 295249 - DNA, 25 bp, probe
tttttatggttcatgttatatcctc

SEQ ID NO: 295250 - DNA, 25 bp, probe
ttttaagtgcttatttagctcttcc

SEQ ID NO: 295251 - DNA, 25 bp, probe
ttttcaaggattaattcttcctcta

SEQ ID NO: 295252 - DNA, 25 bp, probe
tttcaataggaatcattcttctctt

SEQ ID NO: 295253 - DNA, 25 bp, probe
tttttcaggacatgctatcttctat

SEQ ID NO: 295254 - DNA, 25 bp, probe
ttggttatggaattaatggatgcta

SEQ ID NO: 295255 - DNA, 25 bp, probe
ttggtattttttctggcatgcgttt

SEQ ID NO: 295256 - DNA, 25 bp, probe
ttgtttaatttacttggcattttag

SEQ ID NO: 295257 - DNA, 25 bp, probe
tttttaatttgatcagaactgttac

SEQ ID NO: 295258 - DNA, 25 bp, probe
tttttaacattatgagagactgctc

SEQ ID NO: 295259 - DNA, 25 bp, probe
tttttgacctgtcacaagcgctgcc

SEQ ID NO: 295260 - DNA, 25 bp, probe
tttcttgatactcttatagcctgcc

SEQ ID NO: 295261 - DNA, 25 bp, probe
tttcttgaagtgttctctgcctgtc

SEQ ID NO: 295262 - DNA, 25 bp, probe
tttcattaagatctctaatctgttt

SEQ ID NO: 295263 - DNA, 25 bp, probe
tttaaagatagttgctaatccttat

SEQ ID NO: 295264 - DNA, 25 bp, probe
tttaaaacatgctctacatgcctaa

SEQ ID NO: 295265 - DNA, 25 bp, probe
tttacattttctggtactctgtgaa

SEQ ID NO: 295266 - DNA, 25 bp, probe
tttacttcatttgccaatcagagga

SEQ ID NO: 295267 - DNA, 25 bp, probe
tggtgacagaggccatcgcatacct

SEQ ID NO: 295268 - DNA, 25 bp, probe
tttcatcattcggcgtgcgaattaa

SEQ ID NO: 295269 - DNA, 25 bp, probe
tttcatcaacagccttcgcaacaaa

SEQ ID NO: 295270 - DNA, 25 bp, probe
tttacaacacaattgcatcccaaat

SEQ ID NO: 295271 - DNA, 25 bp, probe
tttacggcaatatcatcaccacacg

SEQ ID NO: 295272 - DNA, 25 bp, probe
tttcacccaatgttcacatctgcac

SEQ ID NO: 295273 - DNA, 25 bp, probe
tttcaccaagaattgcagagagcat

SEQ ID NO: 295274 - DNA, 25 bp, probe
tttcaccatcaaaatcgcagacttt

SEQ ID NO: 295275 - DNA, 25 bp, probe
tttaccatcaatcatcaccctgtgg

SEQ ID NO: 295276 - DNA, 25 bp, probe
tttactatacaaagccacctagggc

SEQ ID NO: 295277 - DNA, 25 bp, probe
tttacatatcccaagccctttaggg

SEQ ID NO: 295278 - DNA, 25 bp, probe
ttctgatttcctcagtcctttaggt

SEQ ID NO: 295279 - DNA, 25 bp, probe
ttcttttcgtttcaattgttggatc

SEQ ID NO: 295280 - DNA, 25 bp, probe
ttttcttcatctgtccagttggggt

SEQ ID NO: 295281 - DNA, 25 bp, probe
tttagatgtcgtatccggagagagc

SEQ ID NO: 295282 - DNA, 25 bp, probe
tttatgagggagaccccgacagagg

SEQ ID NO: 295283 - DNA, 25 bp, probe
ttctgaaacggaatcccagccagcg

SEQ ID NO: 295284 - DNA, 25 bp, probe
ttctgaaacggaatcccagccagcg

SEQ ID NO: 295285 - DNA, 25 bp, probe
tttaaactgtgagcacgcagagcac

SEQ ID NO: 295286 - DNA, 25 bp, probe
tttacaaattgatcctgctgacagg

SEQ ID NO: 295287 - DNA, 25 bp, probe
ttttaggtgtgcatcgctgtgtagt

SEQ ID NO: 295288 - DNA, 25 bp, probe
tttcagaaggtcatcagattgtgag

SEQ ID NO: 295289 - DNA, 25 bp, probe
tttcagaagtgatttagttgtggaa

SEQ ID NO: 295290 - DNA, 25 bp, probe
tttcagaagtgctgtctctttgtgt

SEQ ID NO: 295291 - DNA, 25 bp, probe
tttagagatgtgtacctgcttagtt

SEQ ID NO: 295292 - DNA, 25 bp, probe
tttaggtgtgcatcgctgtgtagtg

SEQ ID NO: 295293 - DNA, 25 bp, probe
tttagccattgcacagtcagctgca

SEQ ID NO: 295294 - DNA, 25 bp, probe
tttacagttgcatcaggcctgaacc

SEQ ID NO: 295295 - DNA, 25 bp, probe
tttacagccgcaagcacccagcggc

SEQ ID NO: 295296 - DNA, 25 bp, probe
ttttcagcctcaagctttacacagc

SEQ ID NO: 295297 - DNA, 25 bp, probe
ttttcagcctcaagctttacacagc

SEQ ID NO: 295298 - DNA, 25 bp, probe
tttactccacatacaatgtaagtgc

SEQ ID NO: 295299 - DNA, 25 bp, probe
tttactatatctacatacatcaatt

SEQ ID NO: 295300 - DNA, 25 bp, probe
tttcatcttcacataacacatattt

SEQ ID NO: 295301 - DNA, 25 bp, probe
tttcttcctcaccaatgacattctt

SEQ ID NO: 295302 - DNA, 25 bp, probe
tttttcccacaaatgccactcttgg

SEQ ID NO: 295303 - DNA, 25 bp, probe
tttatttaaccaatgaccttatggc

SEQ ID NO: 295304 - DNA, 25 bp, probe
tttattttaccattgactgctgccc

SEQ ID NO: 295305 - DNA, 25 bp, probe
ttttattcgcaccattgcggtcgcg

SEQ ID NO: 295306 - DNA, 25 bp, probe
tttattcgcaccattgcggtcgcgc

SEQ ID NO: 295307 - DNA, 25 bp, probe
ttatgtgtggcaccatctctgtggt

SEQ ID NO: 295308 - DNA, 25 bp, probe
ttatgtgtggcaccatctctgtggt

SEQ ID NO: 295309 - DNA, 25 bp, probe
ttatgtgtggcaccatctctgtggt

SEQ ID NO: 295310 - DNA, 25 bp, probe
tttatggagctgctcttgctgtcat

SEQ ID NO: 295311 - DNA, 25 bp, probe
tttagctggatgctcattcagtctg

SEQ ID NO: 295312 - DNA, 25 bp, probe
ttttcatgtatgctcgacctcgagt

SEQ ID NO: 295313 - DNA, 25 bp, probe
ttttcagtatgtcacctttgctgct

SEQ ID NO: 295314 - DNA, 25 bp, probe
tttatgcattacacaccttagctat

SEQ ID NO: 295315 - DNA, 25 bp, probe
tttagcattcactaagccctacata

SEQ ID NO: 295316 - DNA, 25 bp, probe
tttagcatccaccaattttcactgc

SEQ ID NO: 295317 - DNA, 25 bp, probe
tttaccctcagctattcttcagctt

SEQ ID NO: 295318 - DNA, 25 bp, probe
tttacgctctgatgcattctgtcat

SEQ ID NO: 295319 - DNA, 25 bp, probe
tttactttggagctctgtctttcat

SEQ ID NO: 295320 - DNA, 25 bp, probe
ttttctggttgacatcgttttaaat

SEQ ID NO: 295321 - DNA, 25 bp, probe
tttactgtgtttcttttggttccat

SEQ ID NO: 295322 - DNA, 25 bp, probe
ttttttttttctgtgctggttgcca

SEQ ID NO: 295323 - DNA, 25 bp, probe
tttattttgtttgttcggcatacaa

SEQ ID NO: 295324 - DNA, 25 bp, probe
tttaatttccttgttcctcattata

SEQ ID NO: 295325 - DNA, 25 bp, probe
tttaatttcttagcttcctgttcta

SEQ ID NO: 295326 - DNA, 25 bp, probe
tttacttcccaagctgtttgttctc

SEQ ID NO: 295327 - DNA, 25 bp, probe
tttaatttccaaattgtcattttca

SEQ ID NO: 295328 - DNA, 25 bp, probe
tttaatttcacaagttgttcattta

SEQ ID NO: 295329 - DNA, 25 bp, probe
ttttatgttccccttgttgatgtta

SEQ ID NO: 295330 - DNA, 25 bp, probe
ttttctttccaggtagagtagctct

SEQ ID NO: 295331 - DNA, 25 bp, probe
tttatctcccacgactcagtgaagt

SEQ ID NO: 295332 - DNA, 25 bp, probe
tttcaactcctcaagccgtaatgtt

SEQ ID NO: 295333 - DNA, 25 bp, probe
tttacctcatccatgcactttaatt

SEQ ID NO: 295334 - DNA, 25 bp, probe
tttactttctcacctctgttgaaac

SEQ ID NO: 295335 - DNA, 25 bp, probe
tttttttgtgatctacttgaagtcc

SEQ ID NO: 295336 - DNA, 25 bp, probe
ttttctctggtggcattcctttagg

SEQ ID NO: 295337 - DNA, 25 bp, probe
tttttctcttccagcttttgggact

SEQ ID NO: 295338 - DNA, 25 bp, probe
tttagtcctgaaaattatttggaat

SEQ ID NO: 295339 - DNA, 25 bp, probe
tttagtatgctattaagtcattctg

SEQ ID NO: 295340 - DNA, 25 bp, probe
tttagtcagtttcatgccatatcat

SEQ ID NO: 295341 - DNA, 25 bp, probe
ttattgtcagtttttccagtaaggt

SEQ ID NO: 295342 - DNA, 25 bp, probe
tttttgtgtttttccggcaagtgat

SEQ ID NO: 295343 - DNA, 25 bp, probe
tttttgtgtttttccggcaagtgat

SEQ ID NO: 295344 - DNA, 25 bp, probe
tttaaattttgttgcctgttgagga

SEQ ID NO: 295345 - DNA, 25 bp, probe
tttaatttctcgcagtcttcctgga

SEQ ID NO: 295346 - DNA, 25 bp, probe
tttacttttcagtgtctacgagcag

SEQ ID NO: 295347 - DNA, 25 bp, probe
tttcagcttttgtattccatactaa

SEQ ID NO: 295348 - DNA, 25 bp, probe
tttactttgagaatctcctgtccaa

SEQ ID NO: 295349 - DNA, 25 bp, probe
tttacaatctgactgtctcttggga

SEQ ID NO: 295350 - DNA, 25 bp, probe
ttttcatattgaggctgcagctaga

SEQ ID NO: 295351 - DNA, 25 bp, probe
ttttgtttgaggcttagaacgctgg

SEQ ID NO: 295352 - DNA, 25 bp, probe
ttatcttttgaatatttaagccttg

SEQ ID NO: 295353 - DNA, 25 bp, probe
ttctgtgttaaatcatttcagggtt

SEQ ID NO: 295354 - DNA, 25 bp, probe
tttattcttaagcatttcagggtaa

SEQ ID NO: 295355 - DNA, 25 bp, probe
ttgtttgaaccacattctggggaag

SEQ ID NO: 295356 - DNA, 25 bp, probe
ttttgaaaactgcggtggaggaagt

SEQ ID NO: 295357 - DNA, 25 bp, probe
tttttaagacggaagatggaggcaa

SEQ ID NO: 295358 - DNA, 25 bp, probe
tttttgggaccatcactgagagtca

SEQ ID NO: 295359 - DNA, 25 bp, probe
tttatctggaacgtcaccttggtca

SEQ ID NO: 295360 - DNA, 25 bp, probe
tttatctggaacgtcaccttggtca

SEQ ID NO: 295361 - DNA, 25 bp, probe
tttcaggaaacaatcaccttgctcc

SEQ ID NO: 295362 - DNA, 25 bp, probe
tttcatgttgaacacagctctctcc

SEQ ID NO: 295363 - DNA, 25 bp, probe
tttagtgtctacaatcagctctccc

SEQ ID NO: 295364 - DNA, 25 bp, probe
tttaatgtctgagaaagactctcta

SEQ ID NO: 295365 - DNA, 25 bp, probe
tttaatgacaatgaagtgacacttt

SEQ ID NO: 295366 - DNA, 25 bp, probe
tttattaacatttgcaggacacttt

SEQ ID NO: 295367 - DNA, 25 bp, probe
tttttgcaaaggtctgtgataccat

SEQ ID NO: 295368 - DNA, 25 bp, probe
tttttcagctcatcctggaacatat

SEQ ID NO: 295369 - DNA, 25 bp, probe
tttttcccttctgtgatgaattctt

SEQ ID NO: 295370 - DNA, 25 bp, probe
tttactccctttcatgtgatgttgc

SEQ ID NO: 295371 - DNA, 25 bp, probe
tttacccctgctttgaagatgtggc

SEQ ID NO: 295372 - DNA, 25 bp, probe
tttacaccttgatttcgaggtggaa

SEQ ID NO: 295373 - DNA, 25 bp, probe
tttagccctggacccagcaggtgag

SEQ ID NO: 295374 - DNA, 25 bp, probe
tttaccatgctcaatgaaaaggtga

SEQ ID NO: 295375 - DNA, 25 bp, probe
tttacctgtcaataaagcagaagac

SEQ ID NO: 295376 - DNA, 25 bp, probe
tttcagccgtaattagtacaagtga

SEQ ID NO: 295377 - DNA, 25 bp, probe
ttttctgcctaatagtaactggtta

SEQ ID NO: 295378 - DNA, 25 bp, probe
ttttctgcctaatagtaactggtta

SEQ ID NO: 295379 - DNA, 25 bp, probe
ttttatgcttagaacaccagggttt

SEQ ID NO: 295380 - DNA, 25 bp, probe
ttgttagtgggcaaaccaccttctg

SEQ ID NO: 295381 - DNA, 25 bp, probe
ttgttagtgggcaaaccaccttctg

SEQ ID NO: 295382 - DNA, 25 bp, probe
ttttcttaggtatacaaatgtgatg

SEQ ID NO: 295383 - DNA, 25 bp, probe
ttttctacggttgcaaactgctgac

SEQ ID NO: 295384 - DNA, 25 bp, probe
ttttataattgcttccaaacagctg

SEQ ID NO: 295385 - DNA, 25 bp, probe
tttttatgcttcttagagacacagt

SEQ ID NO: 295386 - DNA, 25 bp, probe
tttttatgcttagaacaccagggtt

SEQ ID NO: 295387 - DNA, 25 bp, probe
ttttttatgcttagaacaccagggt

SEQ ID NO: 295388 - DNA, 25 bp, probe
ttatttttttcagaacaagtgatgt

SEQ ID NO: 295389 - DNA, 25 bp, probe
tttcagcttttgacaccaacaagtt

SEQ ID NO: 295390 - DNA, 25 bp, probe
tttagcacttctcaccagagagatg

SEQ ID NO: 295391 - DNA, 25 bp, probe
tttacatcagcctaaccgcagaaat

SEQ ID NO: 295392 - DNA, 25 bp, probe
tttacatcagcctaaccgcagaaat

SEQ ID NO: 295393 - DNA, 25 bp, probe
tttaacacctaggcctgcaaattct

SEQ ID NO: 295394 - DNA, 25 bp, probe
tttaacacctaggcctgcaaattct

SEQ ID NO: 295395 - DNA, 25 bp, probe
ttataaccgctacactacagagtct

SEQ ID NO: 295396 - DNA, 25 bp, probe
ttataaaggagaataccacagagct

SEQ ID NO: 295397 - DNA, 25 bp, probe
tttataaccgctacactacagagtc

SEQ ID NO: 295398 - DNA, 25 bp, probe
tttagagctcctggacagtaaagtc

SEQ ID NO: 295399 - DNA, 25 bp, probe
tttagcgcacccagagaaaattaat

SEQ ID NO: 295400 - DNA, 25 bp, probe
tttagcatgacattcggggaaagga

SEQ ID NO: 295401 - DNA, 25 bp, probe
tttcacgctttccgggttcatgtga

SEQ ID NO: 295402 - DNA, 25 bp, probe
ttaggcgcttcaggcggagttggta

SEQ ID NO: 295403 - DNA, 25 bp, probe
ttagtgcagctagtcgggtgtaatt

SEQ ID NO: 295404 - DNA, 25 bp, probe
ttttagtgaccacgggctacatcat

SEQ ID NO: 295405 - DNA, 25 bp, probe
ttttggaaccagtaggccgctctac

SEQ ID NO: 295406 - DNA, 25 bp, probe
ttttacatatcccaagccctttagg

SEQ ID NO: 295407 - DNA, 25 bp, probe
ttttagatgccacaaagcggttagg

SEQ ID NO: 295408 - DNA, 25 bp, probe
ttttcatgtgcacttaaacgtgttg

SEQ ID NO: 295409 - DNA, 25 bp, probe
ttttgagtacttgcagagcttcctg

SEQ ID NO: 295410 - DNA, 25 bp, probe
ttttatgccctttggactgtcaggt

SEQ ID NO: 295411 - DNA, 25 bp, probe
tttttggcacggggactgatcagga

SEQ ID NO: 295412 - DNA, 25 bp, probe
tttttgtgcactacatactcttcag

SEQ ID NO: 295413 - DNA, 25 bp, probe
tttatcctgcatggtatcactaaag

SEQ ID NO: 295414 - DNA, 25 bp, probe
ttttcactagcgtacatctaaggaa

SEQ ID NO: 295415 - DNA, 25 bp, probe
ttttcagtaccatccaatggagcaa

SEQ ID NO: 295416 - DNA, 25 bp, probe
tttattttgcctgtgcataggagca

SEQ ID NO: 295417 - DNA, 25 bp, probe
tttatttctgcagggctgaaagcac

SEQ ID NO: 295418 - DNA, 25 bp, probe
tttatatgattcacatgctaaagcc

SEQ ID NO: 295419 - DNA, 25 bp, probe
ttttaatctctcgactgaatggact

SEQ ID NO: 295420 - DNA, 25 bp, probe
ttttcaccctcgttgaatgggccaa

SEQ ID NO: 295421 - DNA, 25 bp, probe
ttttacccctgtggattgggcagaa

SEQ ID NO: 295422 - DNA, 25 bp, probe
ttttaacttagagattaggctgaaa

SEQ ID NO: 295423 - DNA, 25 bp, probe
ttttaagttatggcaattatgaata

SEQ ID NO: 295424 - DNA, 25 bp, probe
tttaatagtcattccaaatatgaga

SEQ ID NO: 295425 - DNA, 25 bp, probe
tttaatagtcattccaaatatgaga

SEQ ID NO: 295426 - DNA, 25 bp, probe
tttaaagtgctgtcttactaagtct

SEQ ID NO: 295427 - DNA, 25 bp, probe
tttaattattgttatacacagcttt

SEQ ID NO: 295428 - DNA, 25 bp, probe
tttatatttctttcattgggcgctt

SEQ ID NO: 295429 - DNA, 25 bp, probe
ttgtattttttctctggtggcattc

SEQ ID NO: 295430 - DNA, 25 bp, probe
tttttttttgagtcggagtcttgct

SEQ ID NO: 295431 - DNA, 25 bp, probe
tttttttgtatatgtggagcttctg

SEQ ID NO: 295432 - DNA, 25 bp, probe
tttttttggtgattaaactccattg

SEQ ID NO: 295433 - DNA, 25 bp, probe
tttttttaatttatcctctgttgat

SEQ ID NO: 295434 - DNA, 25 bp, probe
tttttttccttcagtgccttatgga

SEQ ID NO: 295435 - DNA, 25 bp, probe
ttttctggggggatgtccattttgg

SEQ ID NO: 295436 - DNA, 25 bp, probe
tttttctggggggatgtccattttg

SEQ ID NO: 295437 - DNA, 25 bp, probe
ttgtgtttggggctcatgaccttgg

SEQ ID NO: 295438 - DNA, 25 bp, probe
tttttcgaagagcatgtgaagttac

SEQ ID NO: 295439 - DNA, 25 bp, probe
ttttagtgttggcagtaatgttgat

SEQ ID NO: 295440 - DNA, 25 bp, probe
ttttcagtgcacccaattactgtta

SEQ ID NO: 295441 - DNA, 25 bp, probe
tttacaggaacctttgctctttcaa

SEQ ID NO: 295442 - DNA, 25 bp, probe
tttacaagatccatttgcctttctg

SEQ ID NO: 295443 - DNA, 25 bp, probe
tttaaaactctttatcccatcttga

SEQ ID NO: 295444 - DNA, 25 bp, probe
tttaaaaaattgtgcgctctgtaga

SEQ ID NO: 295445 - DNA, 25 bp, probe
tttaacagggtatgctgcctctgta

SEQ ID NO: 295446 - DNA, 25 bp, probe
ttagtgacagggtggcagtcccata

SEQ ID NO: 295447 - DNA, 25 bp, probe
ttagggcagtgtccgtcagtgccct

SEQ ID NO: 295448 - DNA, 25 bp, probe
ttaggcgcaatgatcgaggtcccgg

SEQ ID NO: 295449 - DNA, 25 bp, probe
ttaggcgcaatgatcgaggtcccgg

SEQ ID NO: 295450 - DNA, 25 bp, probe
ttagcctaagttgggtgccccaggg

SEQ ID NO: 295451 - DNA, 25 bp, probe
ttacgtagagagggtggccacaagg

SEQ ID NO: 295452 - DNA, 25 bp, probe
tttatgtagagagggcgccacactg

SEQ ID NO: 295453 - DNA, 25 bp, probe
tttagtagagctgggctgtcacccc

SEQ ID NO: 295454 - DNA, 25 bp, probe
tttcaaaatttgccgtcagcacacc

SEQ ID NO: 295455 - DNA, 25 bp, probe
ttaaaaattattcaagcactcttaa

SEQ ID NO: 295456 - DNA, 25 bp, probe
tttaaaaattattcaagcactctta

SEQ ID NO: 295457 - DNA, 25 bp, probe
tttaaaaattattcaagcactctta

SEQ ID NO: 295458 - DNA, 25 bp, probe
tttcaagtattttaattgcacctta

SEQ ID NO: 295459 - DNA, 25 bp, probe
tttacacttccttaactgcacgata

SEQ ID NO: 295460 - DNA, 25 bp, probe
tttaccttcgtcaacttgccgatgt

SEQ ID NO: 295461 - DNA, 25 bp, probe
tttaccataagggactgtgccagat

SEQ ID NO: 295462 - DNA, 25 bp, probe
ttgaacttttgggacgtggcgttgg

SEQ ID NO: 295463 - DNA, 25 bp, probe
ttgaacctttggaggccgttgatgt

SEQ ID NO: 295464 - DNA, 25 bp, probe
tttacctgattgcttgggaattggc

SEQ ID NO: 295465 - DNA, 25 bp, probe
tttacacgtgtgcttggttttgcct

SEQ ID NO: 295466 - DNA, 25 bp, probe
ttttcacatttgctctgggttatct

SEQ ID NO: 295467 - DNA, 25 bp, probe
ttttagacattcctcgtcagtatta

SEQ ID NO: 295468 - DNA, 25 bp, probe
ttttaaacctcaagtaacatctgag

SEQ ID NO: 295469 - DNA, 25 bp, probe
ttttaaaagctcagaatatcacatt

SEQ ID NO: 295470 - DNA, 25 bp, probe
ttttctctaactcagaaacatcagt

SEQ ID NO: 295471 - DNA, 25 bp, probe
ttttctgtcacctgatgaatcgtct

SEQ ID NO: 295472 - DNA, 25 bp, probe
ttgaccgctacctgaacatagttca

SEQ ID NO: 295473 - DNA, 25 bp, probe
ttacctgtacactgacttgagacca

SEQ ID NO: 295474 - DNA, 25 bp, probe
ttacctgtacactgacttgagacca

SEQ ID NO: 295475 - DNA, 25 bp, probe
ttatcgtttacatcagcctaaccgc

SEQ ID NO: 295476 - DNA, 25 bp, probe
ttatcgtttacatcagcctaaccgc

SEQ ID NO: 295477 - DNA, 25 bp, probe
ttataattatacctactttacccat

SEQ ID NO: 295478 - DNA, 25 bp, probe
tttaatttgtagccatcttttccca

SEQ ID NO: 295479 - DNA, 25 bp, probe
tttaatttgtagccatcttttccca

SEQ ID NO: 295480 - DNA, 25 bp, probe
tttaaatgtgatacccatagcttcc

SEQ ID NO: 295481 - DNA, 25 bp, probe
ttttgaagtcttccctcagatttcc

SEQ ID NO: 295482 - DNA, 25 bp, probe
ttttctagtttccctggatttcact

SEQ ID NO: 295483 - DNA, 25 bp, probe
ttttccaccgtcaaaggtgtggcct

SEQ ID NO: 295484 - DNA, 25 bp, probe
ttttccaccgtcaaaggtgtggcct

SEQ ID NO: 295485 - DNA, 25 bp, probe
ttttaaccgctatagagtattccat

SEQ ID NO: 295486 - DNA, 25 bp, probe
ttttccaactgtttccagttcccat

SEQ ID NO: 295487 - DNA, 25 bp, probe
ttatttaactgatatcccactgccc

SEQ ID NO: 295488 - DNA, 25 bp, probe
ttttaaatggtcttcatgccccaca

SEQ ID NO: 295489 - DNA, 25 bp, probe
ttttaaatcgacgtctctctcacca

SEQ ID NO: 295490 - DNA, 25 bp, probe
ttttcattcaaaatctgcccaacca

SEQ ID NO: 295491 - DNA, 25 bp, probe
ttttcctacaatctgactcaactgc

SEQ ID NO: 295492 - DNA, 25 bp, probe
ttttcctacaatctgactcaactgc

SEQ ID NO: 295493 - DNA, 25 bp, probe
ttttccttcaatctacctagcatgc

SEQ ID NO: 295494 - DNA, 25 bp, probe
tttttctccataaatgacactactt

SEQ ID NO: 295495 - DNA, 25 bp, probe
tttttccagccgttgaccaattata

SEQ ID NO: 295496 - DNA, 25 bp, probe
tttttcacagcagattaccatttat

SEQ ID NO: 295497 - DNA, 25 bp, probe
tttattccacatcattatgcctata

SEQ ID NO: 295498 - DNA, 25 bp, probe
tttattccacatcattatgcctata

SEQ ID NO: 295499 - DNA, 25 bp, probe
tttatcccatcaattcttgtgccaa

SEQ ID NO: 295500 - DNA, 25 bp, probe
tttttcctgcatgttctgtgactga

SEQ ID NO: 295501 - DNA, 25 bp, probe
tttttccaggcaatgacgtcgatga

SEQ ID NO: 295502 - DNA, 25 bp, probe
ttttaccaggcagtgaggaaattat

SEQ ID NO: 295503 - DNA, 25 bp, probe
ttttaccaggcagtgaggaaattat

SEQ ID NO: 295504 - DNA, 25 bp, probe
ttttaccaggaatggatgtcgctaa

SEQ ID NO: 295505 - DNA, 25 bp, probe
ttttctaccaactatggttgcctca

SEQ ID NO: 295506 - DNA, 25 bp, probe
ttttcttaaactttgtatctctagg

SEQ ID NO: 295507 - DNA, 25 bp, probe
tttttttgacattaagttgcttagg

SEQ ID NO: 295508 - DNA, 25 bp, probe
tttatactgtaataagctctttgaa

SEQ ID NO: 295509 - DNA, 25 bp, probe
tttatactgtaataagctctttgaa

SEQ ID NO: 295510 - DNA, 25 bp, probe
tttaactcttggtcatcagccttat

SEQ ID NO: 295511 - DNA, 25 bp, probe
tttaactttgctctcagatgcctca

SEQ ID NO: 295512 - DNA, 25 bp, probe
tttacactgcctcttagcagcctaa

SEQ ID NO: 295513 - DNA, 25 bp, probe
tttatacatggcttttgctcacact

SEQ ID NO: 295514 - DNA, 25 bp, probe
tttaagctgttcttgtgctcaattg

SEQ ID NO: 295515 - DNA, 25 bp, probe
tttaatgtatatttgctgcaaagag

SEQ ID NO: 295516 - DNA, 25 bp, probe
ttctcaacaagatggccaaaggtgc

SEQ ID NO: 295517 - DNA, 25 bp, probe
tttaccaaaagagtatcaaggccag

SEQ ID NO: 295518 - DNA, 25 bp, probe
tttacagatcacaaaggcatcaagg

SEQ ID NO: 295519 - DNA, 25 bp, probe
tttagactcaccagagatattgtgg

SEQ ID NO: 295520 - DNA, 25 bp, probe
tttagattcccttgaagatgtgtcc

SEQ ID NO: 295521 - DNA, 25 bp, probe
tttacatgtccaccggagcagtgcc

SEQ ID NO: 295522 - DNA, 25 bp, probe
tttacagcactactctgtgccagcc

SEQ ID NO: 295523 - DNA, 25 bp, probe
tttacagcaggacgctttcagcagc

SEQ ID NO: 295524 - DNA, 25 bp, probe
tttactcagtgactgttgtagcatt

SEQ ID NO: 295525 - DNA, 25 bp, probe
tttacatcgtcacggagtacatgag

SEQ ID NO: 295526 - DNA, 25 bp, probe
ttttcatcctaccagatgagaaagg

SEQ ID NO: 295527 - DNA, 25 bp, probe
ttttcttgattccagaaacatatgg

SEQ ID NO: 295528 - DNA, 25 bp, probe
ttttcttgtacatgaggcctgtggt

SEQ ID NO: 295529 - DNA, 25 bp, probe
ttttctctggaatggtacatgtctt

SEQ ID NO: 295530 - DNA, 25 bp, probe
ttttcttgagaatgttactgcaatc

SEQ ID NO: 295531 - DNA, 25 bp, probe
ttttcttgagaatgttactgcaatc

SEQ ID NO: 295532 - DNA, 25 bp, probe
ttttctgagacttggattaattcat

SEQ ID NO: 295533 - DNA, 25 bp, probe
ttttgtggttgtcttacattctttt

SEQ ID NO: 295534 - DNA, 25 bp, probe
ttttgctggaattcctaacttttca

SEQ ID NO: 295535 - DNA, 25 bp, probe
ttttctgtttacgtaacctgcttag

SEQ ID NO: 295536 - DNA, 25 bp, probe
tttttcttatagcaatacactgtaa

SEQ ID NO: 295537 - DNA, 25 bp, probe
tttttcttctcccaatagctttcaa

SEQ ID NO: 295538 - DNA, 25 bp, probe
ttgagttctttctgggacttggaga

SEQ ID NO: 295539 - DNA, 25 bp, probe
tttattcttatcttaggatttacca

SEQ ID NO: 295540 - DNA, 25 bp, probe
tttatttctttactggatcttcaca

SEQ ID NO: 295541 - DNA, 25 bp, probe
tttttgttcttcataattatcacta

SEQ ID NO: 295542 - DNA, 25 bp, probe
tttttcaccttcatagcatactcct

SEQ ID NO: 295543 - DNA, 25 bp, probe
tttttcccttatgagatccacctaa

SEQ ID NO: 295544 - DNA, 25 bp, probe
tttttcccttatgagatccacctaa

SEQ ID NO: 295545 - DNA, 25 bp, probe
ttttctccctagttagacacaccaa

SEQ ID NO: 295546 - DNA, 25 bp, probe
tttttcaccctacatgaatccaaag

SEQ ID NO: 295547 - DNA, 25 bp, probe
ttttttccctatctgtatctatagc

SEQ ID NO: 295548 - DNA, 25 bp, probe
ttttttcaattacatgttgcttcca

SEQ ID NO: 295549 - DNA, 25 bp, probe
tttttttcttactaggtcatgttca

SEQ ID NO: 295550 - DNA, 25 bp, probe
ttttccttttagtaagatctttatg

SEQ ID NO: 295551 - DNA, 25 bp, probe
ttttcctttctctgtattctttatg

SEQ ID NO: 295552 - DNA, 25 bp, probe
ttttcgtaatttgtattgcattcta

SEQ ID NO: 295553 - DNA, 25 bp, probe
ttttcgtaatttgtattgcattcta

SEQ ID NO: 295554 - DNA, 25 bp, probe
ttttcaggacatgctatcttctatt

SEQ ID NO: 295555 - DNA, 25 bp, probe
ttttcaaaacctttctctgatattt

SEQ ID NO: 295556 - DNA, 25 bp, probe
ttttcagaaactaccaccaaattat

SEQ ID NO: 295557 - DNA, 25 bp, probe
ttttcggaactgaggccatgattaa

SEQ ID NO: 295558 - DNA, 25 bp, probe
ttttcaggactctggcctcagagga

SEQ ID NO: 295559 - DNA, 25 bp, probe
ttttccctcatgctgtcctatagga

SEQ ID NO: 295560 - DNA, 25 bp, probe
tttattactgtcctgtcctacggat

SEQ ID NO: 295561 - DNA, 25 bp, probe
tttattactgtcctgtcctacggat

SEQ ID NO: 295562 - DNA, 25 bp, probe
tttttactttcagttctacgtgaat

SEQ ID NO: 295563 - DNA, 25 bp, probe
tttttcctttagccttagcagtggg

SEQ ID NO: 295564 - DNA, 25 bp, probe
ttttttgttctacctcaaagataag

SEQ ID NO: 295565 - DNA, 25 bp, probe
ttttttgtgtatggcaccagaagtc

SEQ ID NO: 295566 - DNA, 25 bp, probe
tttattgctgttggtgccagagaag

SEQ ID NO: 295567 - DNA, 25 bp, probe
tttacagatattgctgccagatcaa

SEQ ID NO: 295568 - DNA, 25 bp, probe
tttaccatatgttgctccagaactt

SEQ ID NO: 295569 - DNA, 25 bp, probe
tttatccctgcttatctgaaacttc

SEQ ID NO: 295570 - DNA, 25 bp, probe
tttattcctgctcgtgcttaagatt

SEQ ID NO: 295571 - DNA, 25 bp, probe
tttatatcctcttctgttgaatgca

SEQ ID NO: 295572 - DNA, 25 bp, probe
ttttatcactgtctttcagctgccc

SEQ ID NO: 295573 - DNA, 25 bp, probe
ttttgtcgttgccttcacagtggac

SEQ ID NO: 295574 - DNA, 25 bp, probe
ttttgcccgtggagctcatggagac

SEQ ID NO: 295575 - DNA, 25 bp, probe
tttagccaggtactctgctcataga

SEQ ID NO: 295576 - DNA, 25 bp, probe
ttttaaggccacggcttgtgtctga

SEQ ID NO: 295577 - DNA, 25 bp, probe
ttttttcagaacaagtgatgtttga

SEQ ID NO: 295578 - DNA, 25 bp, probe
tttttctccaacgaagtcttatatt

SEQ ID NO: 295579 - DNA, 25 bp, probe
tttagtacccaaatcgtcttatatt

SEQ ID NO: 295580 - DNA, 25 bp, probe
tttaggtcttgcatatcagttttat

SEQ ID NO: 295581 - DNA, 25 bp, probe
tttaggtctttaatacagtgtttct

SEQ ID NO: 295582 - DNA, 25 bp, probe
tttagcttttcttctactggcttgt

SEQ ID NO: 295583 - DNA, 25 bp, probe
tttacattcttctaatagttatagt

SEQ ID NO: 295584 - DNA, 25 bp, probe
ttcatacgtctttattacccaagtc

SEQ ID NO: 295585 - DNA, 25 bp, probe
tttactcttttgatggcccaggaca

SEQ ID NO: 295586 - DNA, 25 bp, probe
tttacttatcttatgccacgggaag

SEQ ID NO: 295587 - DNA, 25 bp, probe
tttattttctatttcgcacagggtc

SEQ ID NO: 295588 - DNA, 25 bp, probe
ttttatttctggctcttcggatgtc

SEQ ID NO: 295589 - DNA, 25 bp, probe
ttttatttctggctcttcggatgtc

SEQ ID NO: 295590 - DNA, 25 bp, probe
ttttcattttcgtaatttgtattgc

SEQ ID NO: 295591 - DNA, 25 bp, probe
ttttacatctctgtagttttatttt

SEQ ID NO: 295592 - DNA, 25 bp, probe
ttgtaaaccgtttgtctgtcttttg

SEQ ID NO: 295593 - DNA, 25 bp, probe
tttataacccctgcctgtatttatg

SEQ ID NO: 295594 - DNA, 25 bp, probe
ttcttaaaccctgcagtgttaaaca

SEQ ID NO: 295595 - DNA, 25 bp, probe
ttctgtaaacctcaactcgtgaaga

SEQ ID NO: 295596 - DNA, 25 bp, probe
ttaagaaaactggcaactgggaaga

SEQ ID NO: 295597 - DNA, 25 bp, probe
ttaatgagcgaatgccaccccgaaa

SEQ ID NO: 295598 - DNA, 25 bp, probe
ttaatgagcgaatgccaccccgaaa

SEQ ID NO: 295599 - DNA, 25 bp, probe
ttaattccaagggcataccccgcta

SEQ ID NO: 295600 - DNA, 25 bp, probe
ttattactaactgtagtcctccccg

SEQ ID NO: 295601 - DNA, 25 bp, probe
ttattctaaattatttcctcaccat

SEQ ID NO: 295602 - DNA, 25 bp, probe
ttttaaagatacagtgctccccact

SEQ ID NO: 295603 - DNA, 25 bp, probe
tttattaaatcactgttctccccag

SEQ ID NO: 295604 - DNA, 25 bp, probe
tttactcaaatcaatttctcccctg

SEQ ID NO: 295605 - DNA, 25 bp, probe
tttacagcaactcaattctaccact

SEQ ID NO: 295606 - DNA, 25 bp, probe
tttatagcacctcagacattcccaa

SEQ ID NO: 295607 - DNA, 25 bp, probe
ttttactccttttcttccagagatc

SEQ ID NO: 295608 - DNA, 25 bp, probe
ttttagtgccttaatttgagataat

SEQ ID NO: 295609 - DNA, 25 bp, probe
ttttcgtcgccaaatgttgctgaca

SEQ ID NO: 295610 - DNA, 25 bp, probe
ttttggcgcccacagtgatgatgtc

SEQ ID NO: 295611 - DNA, 25 bp, probe
ttttgatgtctgcagaagaatgtgt

SEQ ID NO: 295612 - DNA, 25 bp, probe
ttttgttcccgctcagtgtgaagtt

SEQ ID NO: 295613 - DNA, 25 bp, probe
ttttgaacctccaacagggaaggct

SEQ ID NO: 295614 - DNA, 25 bp, probe
ttttaaccataaagcagcttaccct

SEQ ID NO: 295615 - DNA, 25 bp, probe
ttttaaccataaagcagcttaccct

SEQ ID NO: 295616 - DNA, 25 bp, probe
ttttaacaccaatgctgaaccccat

SEQ ID NO: 295617 - DNA, 25 bp, probe
ttttcttcacgaaacaaatcccctg

SEQ ID NO: 295618 - DNA, 25 bp, probe
ttttttcccttatgagatccaccta

SEQ ID NO: 295619 - DNA, 25 bp, probe
ttttttttcttatagcaatacactg

SEQ ID NO: 295620 - DNA, 25 bp, probe
ttttcttttggtttagttctatctg

SEQ ID NO: 295621 - DNA, 25 bp, probe
tttacctcttgctattttgttatat

SEQ ID NO: 295622 - DNA, 25 bp, probe
tttacctcagtccatttcattaact

SEQ ID NO: 295623 - DNA, 25 bp, probe
tttacagctcagactattacaataa

SEQ ID NO: 295624 - DNA, 25 bp, probe
ttttcagctcatgtttccataatac

SEQ ID NO: 295625 - DNA, 25 bp, probe
ttttcatctcctgtcccaggattag

SEQ ID NO: 295626 - DNA, 25 bp, probe
ttttcctaatatgctcgcaggttag

SEQ ID NO: 295627 - DNA, 25 bp, probe
ttttcctcaagagcccaatgcattc

SEQ ID NO: 295628 - DNA, 25 bp, probe
tttattctaagaacaccatcatttt

SEQ ID NO: 295629 - DNA, 25 bp, probe
tttatattgataacagcactgacta

SEQ ID NO: 295630 - DNA, 25 bp, probe
tttatctgtgacttcatgctctgat

SEQ ID NO: 295631 - DNA, 25 bp, probe
tttattgatcaatctctctgcgggg

SEQ ID NO: 295632 - DNA, 25 bp, probe
tttattacatcgttcatccggtgga

SEQ ID NO: 295633 - DNA, 25 bp, probe
tttttgcaactctttctcgattgaa

SEQ ID NO: 295634 - DNA, 25 bp, probe
tttataattgccttgtcataattgt

SEQ ID NO: 295635 - DNA, 25 bp, probe
tttttcattctcgtgacattaggaa

SEQ ID NO: 295636 - DNA, 25 bp, probe
ttttctttccctacaaactgaacat

SEQ ID NO: 295637 - DNA, 25 bp, probe
ttttctttccctacaaactgaacat

SEQ ID NO: 295638 - DNA, 25 bp, probe
ttttctcttcgttccagataccaaa

SEQ ID NO: 295639 - DNA, 25 bp, probe
ttttctcttcgttccagataccaaa

SEQ ID NO: 295640 - DNA, 25 bp, probe
ttattccttcaatccagtgtcaaga

SEQ ID NO: 295641 - DNA, 25 bp, probe
ttattccttcaatccagtgtcaaga

SEQ ID NO: 295642 - DNA, 25 bp, probe
tttttgctttaccaagtgtacagaa

SEQ ID NO: 295643 - DNA, 25 bp, probe
ttttttgtctcagcatcagtatatc

SEQ ID NO: 295644 - DNA, 25 bp, probe
tttatcttgtcatctccagcaaacc

SEQ ID NO: 295645 - DNA, 25 bp, probe
tttacaagctcagactctgccaaca

SEQ ID NO: 295646 - DNA, 25 bp, probe
tttacaggtgcagtcaccgaaagag

SEQ ID NO: 295647 - DNA, 25 bp, probe
tttagcaggtggactccgtggggct

SEQ ID NO: 295648 - DNA, 25 bp, probe
tttagcaggtggtcctgcgggcgtc

SEQ ID NO: 295649 - DNA, 25 bp, probe
tttagcatgtgaaagcctctctggc

SEQ ID NO: 295650 - DNA, 25 bp, probe
tttatgatatcaaagactcattgct

SEQ ID NO: 295651 - DNA, 25 bp, probe
tttatgtgtcatcaatgtacatgcc

SEQ ID NO: 295652 - DNA, 25 bp, probe
tttagtgacagaacagagaacccag

SEQ ID NO: 295653 - DNA, 25 bp, probe
ttgtaggacggagaaaccgcttggg

SEQ ID NO: 295654 - DNA, 25 bp, probe
ttggaaacggatgacgggcctctag

SEQ ID NO: 295655 - DNA, 25 bp, probe
ttaaaactgaatgagcaaggcctct

SEQ ID NO: 295656 - DNA, 25 bp, probe
ttgaaagactttgagccacagcccg

SEQ ID NO: 295657 - DNA, 25 bp, probe
ttggaggcctttgcagcggcctaca

SEQ ID NO: 295658 - DNA, 25 bp, probe
ttggaggcctttgcagcggcctaca

SEQ ID NO: 295659 - DNA, 25 bp, probe
ttgcaggacacttttacaggcccca

SEQ ID NO: 295660 - DNA, 25 bp, probe
ttttgacatcactgtagggctccca

SEQ ID NO: 295661 - DNA, 25 bp, probe
ttttcctgcaattagacggtcccat

SEQ ID NO: 295662 - DNA, 25 bp, probe
ttttccgctggattgactgggagcg

SEQ ID NO: 295663 - DNA, 25 bp, probe
ttttctctctggcgactggaaagtt

SEQ ID NO: 295664 - DNA, 25 bp, probe
tttactttggccgcttgaaaagcta

SEQ ID NO: 295665 - DNA, 25 bp, probe
ttttctctacgccttcttgaataag

SEQ ID NO: 295666 - DNA, 25 bp, probe
ttttcctataccatgtccacttaga

SEQ ID NO: 295667 - DNA, 25 bp, probe
ttttcctataccatgtccacttaga

SEQ ID NO: 295668 - DNA, 25 bp, probe
ttttcccttatgagatccacctaag

SEQ ID NO: 295669 - DNA, 25 bp, probe
ttttctggatgtattgattcaacta

SEQ ID NO: 295670 - DNA, 25 bp, probe
tttatctctggtttgtgttctccgt

SEQ ID NO: 295671 - DNA, 25 bp, probe
tttactatatgttttgttccctatc

SEQ ID NO: 295672 - DNA, 25 bp, probe
tttactatatgttttgttccctatc

SEQ ID NO: 295673 - DNA, 25 bp, probe
tttactagagtgtttttgcacattt

SEQ ID NO: 295674 - DNA, 25 bp, probe
tttattatgttgtctttatcgactt

SEQ ID NO: 295675 - DNA, 25 bp, probe
tttattgataatgttttgctactct

SEQ ID NO: 295676 - DNA, 25 bp, probe
tttatctaatacctctgtgtgctcc

SEQ ID NO: 295677 - DNA, 25 bp, probe
tttatctaatacctctgtgtgctcc

SEQ ID NO: 295678 - DNA, 25 bp, probe
tttttgaatgaccatctggttgaaa

SEQ ID NO: 295679 - DNA, 25 bp, probe
ttttttcatgaccttgtaatatact

SEQ ID NO: 295680 - DNA, 25 bp, probe
ttttttgtactgttggactctattc

SEQ ID NO: 295681 - DNA, 25 bp, probe
ttgcttttaagttatggcaattatg

SEQ ID NO: 295682 - DNA, 25 bp, probe
ttgttttaattgtgtgcctacagtt

SEQ ID NO: 295683 - DNA, 25 bp, probe
tttattaatttgtaccttaagcatt

SEQ ID NO: 295684 - DNA, 25 bp, probe
tttttacatttctctatgtgcaaat

SEQ ID NO: 295685 - DNA, 25 bp, probe
tttatgtactttgtccttcagcaag

SEQ ID NO: 295686 - DNA, 25 bp, probe
ttttgatcctttgtactctataatg

SEQ ID NO: 295687 - DNA, 25 bp, probe
ttttatactttttggcagcattaaa

SEQ ID NO: 295688 - DNA, 25 bp, probe
tttttactcttaacgccactaatat

SEQ ID NO: 295689 - DNA, 25 bp, probe
tttttactcttaacgccactaatat

SEQ ID NO: 295690 - DNA, 25 bp, probe
tttatttttgtaacaccagtgtctg

SEQ ID NO: 295691 - DNA, 25 bp, probe
ttttatttctgttcagactcaagtt

SEQ ID NO: 295692 - DNA, 25 bp, probe
ttttttcttatagcaatacactgta

SEQ ID NO: 295693 - DNA, 25 bp, probe
tttttttcttatagcaatacactgt

SEQ ID NO: 295694 - DNA, 25 bp, probe
ttattcacaccgatagcaacaccgt

SEQ ID NO: 295695 - DNA, 25 bp, probe
ttttccacggaaacagaactcgatg

SEQ ID NO: 295696 - DNA, 25 bp, probe
ttttatacaagagaacgagccagag

SEQ ID NO: 295697 - DNA, 25 bp, probe
ttttaaagagaacactggacaacat

SEQ ID NO: 295698 - DNA, 25 bp, probe
tttttaaagagaacactggacaaca

SEQ ID NO: 295699 - DNA, 25 bp, probe
ttttcttatagcaatacactgtaat

SEQ ID NO: 295700 - DNA, 25 bp, probe
ttttattctagcaatgaatttgaag

SEQ ID NO: 295701 - DNA, 25 bp, probe
tttatattgtaaatgcacttttcca

SEQ ID NO: 295702 - DNA, 25 bp, probe
ttttgatttaaccaccctgattcat

SEQ ID NO: 295703 - DNA, 25 bp, probe
ttttatgttagctgtcccactatgc

SEQ ID NO: 295704 - DNA, 25 bp, probe
ttttggttagctatgcaaagtcatg

SEQ ID NO: 295705 - DNA, 25 bp, probe
ttttggattttccacatagcaatca

SEQ ID NO: 295706 - DNA, 25 bp, probe
ttttggttttgcccggatcattgga

SEQ ID NO: 295707 - DNA, 25 bp, probe
ttttcaaccaggcccaggtattgga

SEQ ID NO: 295708 - DNA, 25 bp, probe
ttttcacccaaaccatgcttatttg

SEQ ID NO: 295709 - DNA, 25 bp, probe
ttttccccaaaatgcaatgattatt

SEQ ID NO: 295710 - DNA, 25 bp, probe
ttttcccctaaataatgtgctctcc

SEQ ID NO: 295711 - DNA, 25 bp, probe
ttttctcagcctattaaatttccca

SEQ ID NO: 295712 - DNA, 25 bp, probe
ttttctaaatttcaccaaaggagca

SEQ ID NO: 295713 - DNA, 25 bp, probe
ttttctaagcatattcaaaagggtg

SEQ ID NO: 295714 - DNA, 25 bp, probe
ttattcaagcactcttaaaaccact

SEQ ID NO: 295715 - DNA, 25 bp, probe
ttattcaagcactcttaaaaccact

SEQ ID NO: 295716 - DNA, 25 bp, probe
ttttcccacctttaatgaatcccat

SEQ ID NO: 295717 - DNA, 25 bp, probe
ttttccccccagaatataaatctca

SEQ ID NO: 295718 - DNA, 25 bp, probe
ttttccccaccagttataatcttca

SEQ ID NO: 295719 - DNA, 25 bp, probe
tttttactgaccgttgtgaatttct

SEQ ID NO: 295720 - DNA, 25 bp, probe
ttttctactaaatttgagttgatta

SEQ ID NO: 295721 - DNA, 25 bp, probe
ttttatagtatcaaattgtttctaa

SEQ ID NO: 295722 - DNA, 25 bp, probe
ttttaaatctcgtttctcttggaca

SEQ ID NO: 295723 - DNA, 25 bp, probe
tttattaatctatcccttttgtgca

SEQ ID NO: 295724 - DNA, 25 bp, probe
ttttgctcccaatccctatttgaga

SEQ ID NO: 295725 - DNA, 25 bp, probe
ttttcaagccaatcccttaatgtca

SEQ ID NO: 295726 - DNA, 25 bp, probe
ttttctgagaaagactattcaaaca

SEQ ID NO: 295727 - DNA, 25 bp, probe
ttttctacgaatgcactacattaaa

SEQ ID NO: 295728 - DNA, 25 bp, probe
ttttctacaagaatcctgtctagta

SEQ ID NO: 295729 - DNA, 25 bp, probe
tttttcagcaaaatacttcaaatga

SEQ ID NO: 295730 - DNA, 25 bp, probe
tttttcagcaaaatacttcaaatga

SEQ ID NO: 295731 - DNA, 25 bp, probe
tttttcactagcgtacatctaagga

SEQ ID NO: 295732 - DNA, 25 bp, probe
ttttttctacgaatgcactacatta

SEQ ID NO: 295733 - DNA, 25 bp, probe
tttttctacgaatgcactacattaa

SEQ ID NO: 295734 - DNA, 25 bp, probe
ttttttataaccgctacactacaga

SEQ ID NO: 295735 - DNA, 25 bp, probe
ttttttcataatcaactaaggaaga

SEQ ID NO: 295736 - DNA, 25 bp, probe
ttttttctccatcaacagtgaaagg

SEQ ID NO: 295737 - DNA, 25 bp, probe
tttttatctccacacgcagtatgaa

SEQ ID NO: 295738 - DNA, 25 bp, probe
tttaccattccaaaccaatgagatg

SEQ ID NO: 295739 - DNA, 25 bp, probe
tttattgtaccaaagacagtggtgg

SEQ ID NO: 295740 - DNA, 25 bp, probe
tttttgtgatctacttgaagtcctg

SEQ ID NO: 295741 - DNA, 25 bp, probe
ttttgttgctttgtgggctattgcc

SEQ ID NO: 295742 - DNA, 25 bp, probe
ttttgtgttacctggtctcattccc

SEQ ID NO: 295743 - DNA, 25 bp, probe
ttggtgtggcttaacggtatttcag

SEQ ID NO: 295744 - DNA, 25 bp, probe
ttggtgtggcttaacggtatttcag

SEQ ID NO: 295745 - DNA, 25 bp, probe
ttatgttgtctttatcgactttgta

SEQ ID NO: 295746 - DNA, 25 bp, probe
ttatgtggactgaaccgacttttct

SEQ ID NO: 295747 - DNA, 25 bp, probe
ttatgaggacgtgtctgttatttcc

SEQ ID NO: 295748 - DNA, 25 bp, probe
tttaggactgtgtagttgtatattt

SEQ ID NO: 295749 - DNA, 25 bp, probe
tttaggtctctgtccattgctttta

SEQ ID NO: 295750 - DNA, 25 bp, probe
tttatgtgtctcagaatatttttga

SEQ ID NO: 295751 - DNA, 25 bp, probe
tttatggctacccaaattgcctctg

SEQ ID NO: 295752 - DNA, 25 bp, probe
ttttgctttcaccaagaatgtccta

SEQ ID NO: 295753 - DNA, 25 bp, probe
ttttttttctcttcaatgtcactag

SEQ ID NO: 295754 - DNA, 25 bp, probe
tttttgattattaaatagtcactag

SEQ ID NO: 295755 - DNA, 25 bp, probe
tttttttattgggctgagttcacga

SEQ ID NO: 295756 - DNA, 25 bp, probe
tttttcttactaggtcatgttcacg

SEQ ID NO: 295757 - DNA, 25 bp, probe
tttttgcctaaatggagtatacctt

SEQ ID NO: 295758 - DNA, 25 bp, probe
ttacttcctaaatttcagtaggctt

SEQ ID NO: 295759 - DNA, 25 bp, probe
ttaccagcagctgaaaccaattggc

SEQ ID NO: 295760 - DNA, 25 bp, probe
ttgaccattttaaaccgttggcaat

SEQ ID NO: 295761 - DNA, 25 bp, probe
ttagcttttgtttacaccgtggaat

SEQ ID NO: 295762 - DNA, 25 bp, probe
ttttttatgttctacaccaaagaga

SEQ ID NO: 295763 - DNA, 25 bp, probe
ttttttatgttctacaccaaagaga

SEQ ID NO: 295764 - DNA, 25 bp, probe
ttttaaagtttaatgcctagcagag

SEQ ID NO: 295765 - DNA, 25 bp, probe
ttttaacactttgtactgcaaagag

SEQ ID NO: 295766 - DNA, 25 bp, probe
ttttaagactctgttgatgtgataa

SEQ ID NO: 295767 - DNA, 25 bp, probe
ttttatgagacttcctattaattta

SEQ ID NO: 295768 - DNA, 25 bp, probe
tttatatacacttatgccttacatt

SEQ ID NO: 295769 - DNA, 25 bp, probe
tttatcattctgcttccgtatttta

SEQ ID NO: 295770 - DNA, 25 bp, probe
ttttctgatctcccacaagtatttt

SEQ ID NO: 295771 - DNA, 25 bp, probe
ttttctattcagccattattttcat

SEQ ID NO: 295772 - DNA, 25 bp, probe
ttttctattcagccattattttcat

SEQ ID NO: 295773 - DNA, 25 bp, probe
ttttctatggacctgtgggcttcac

SEQ ID NO: 295774 - DNA, 25 bp, probe
ttatctcaaagtccgtggctgtttc

SEQ ID NO: 295775 - DNA, 25 bp, probe
ttatctcaaagtccgtggctgtttc

SEQ ID NO: 295776 - DNA, 25 bp, probe
ttactgaagtatccagttcttagtc

SEQ ID NO: 295777 - DNA, 25 bp, probe
ttttgacatgttcactgtttaacta

SEQ ID NO: 295778 - DNA, 25 bp, probe
tttatcatcgttgactctttgcaaa

SEQ ID NO: 295779 - DNA, 25 bp, probe
tttattgcttgatacttttgacaac

SEQ ID NO: 295780 - DNA, 25 bp, probe
tttatgttctattcatcttttgaat

SEQ ID NO: 295781 - DNA, 25 bp, probe
tttttcttttcaattctagctcaga

SEQ ID NO: 295782 - DNA, 25 bp, probe
tttttctatttaaatcctctctact

SEQ ID NO: 295783 - DNA, 25 bp, probe
ttatcccaattcaagacccttctgt

SEQ ID NO: 295784 - DNA, 25 bp, probe
ttttccagcattacagaaccttggt

SEQ ID NO: 295785 - DNA, 25 bp, probe
ttttccagcattacagaaccttggt

SEQ ID NO: 295786 - DNA, 25 bp, probe
ttttgcctttgataaactgtgatgt

SEQ ID NO: 295787 - DNA, 25 bp, probe
ttttcctgttcttaagacgtgattt

SEQ ID NO: 295788 - DNA, 25 bp, probe
ttgtttcccctataattgtgctgtt

SEQ ID NO: 295789 - DNA, 25 bp, probe
ttgtttcccctataattgtgctgtt

SEQ ID NO: 295790 - DNA, 25 bp, probe
tttttcccctgattttatgagtttg

SEQ ID NO: 295791 - DNA, 25 bp, probe
tttatgttaacctttaagagatttg

SEQ ID NO: 295792 - DNA, 25 bp, probe
ttttgtaaatatccttcgggctttg

SEQ ID NO: 295793 - DNA, 25 bp, probe
ttattggaaaagctccctgccttcc

SEQ ID NO: 295794 - DNA, 25 bp, probe
ttttaaagatagttgctaatcctta

SEQ ID NO: 295795 - DNA, 25 bp, probe
ttttaaagaggattctcataaggaa

SEQ ID NO: 295796 - DNA, 25 bp, probe
ttgtaactaccctctcaaatggaca

SEQ ID NO: 295797 - DNA, 25 bp, probe
ttgaacctggccagcgctaccagga

SEQ ID NO: 295798 - DNA, 25 bp, probe
ttgaacctggccagcgctaccagga

SEQ ID NO: 295799 - DNA, 25 bp, probe
ttgagtatgccggcaacgtcatccg

SEQ ID NO: 295800 - DNA, 25 bp, probe
ttatgtagctacgagatggtaccga

SEQ ID NO: 295801 - DNA, 25 bp, probe
ttattagtccaaatgtgatcaactg

SEQ ID NO: 295802 - DNA, 25 bp, probe
ttttagacatcgtagcttcacatta

SEQ ID NO: 295803 - DNA, 25 bp, probe
ttttagacatcgtagcttcacatta

SEQ ID NO: 295804 - DNA, 25 bp, probe
ttttctgagacacagctgccagcaa

SEQ ID NO: 295805 - DNA, 25 bp, probe
ttttgtggtcatcacagccgcatac

SEQ ID NO: 295806 - DNA, 25 bp, probe
ttttgtggatcgcagctgacctgaa

SEQ ID NO: 295807 - DNA, 25 bp, probe
tttagggtgcccttacttcagcaaa

SEQ ID NO: 295808 - DNA, 25 bp, probe
tttagggtcctgcttcatgacaaaa

SEQ ID NO: 295809 - DNA, 25 bp, probe
ttttctggtactctgtgaaagaaga

SEQ ID NO: 295810 - DNA, 25 bp, probe
tttttagtgctccctacaaatacga

SEQ ID NO: 295811 - DNA, 25 bp, probe
ttttccagtctgctcaagaacatga

SEQ ID NO: 295812 - DNA, 25 bp, probe
ttttacatcttgcttaatcaatatt

SEQ ID NO: 295813 - DNA, 25 bp, probe
ttttacatcttgcttaatcaatatt

SEQ ID NO: 295814 - DNA, 25 bp, probe
ttttatgcatattgtttataaagac

SEQ ID NO: 295815 - DNA, 25 bp, probe
tttatcttacttttggataatatcc

SEQ ID NO: 295816 - DNA, 25 bp, probe
tttatcttacttttggataatatcc

SEQ ID NO: 295817 - DNA, 25 bp, probe
ttttttagtgtgtttgtatatgatc

SEQ ID NO: 295818 - DNA, 25 bp, probe
tttttgtgagtgggtttatgattat

SEQ ID NO: 295819 - DNA, 25 bp, probe
ttttagagcaggtgtatgatctttt

SEQ ID NO: 295820 - DNA, 25 bp, probe
ttttcagacatgattgccaactctt

SEQ ID NO: 295821 - DNA, 25 bp, probe
tttatacagcttttgcaaactcctt

SEQ ID NO: 295822 - DNA, 25 bp, probe
ttttcatcgtctgctcaataccgtg

SEQ ID NO: 295823 - DNA, 25 bp, probe
ttggtacgtcagataacagctaatg

SEQ ID NO: 295824 - DNA, 25 bp, probe
ttttacgtgcaaacaacctgaatct

SEQ ID NO: 295825 - DNA, 25 bp, probe
ttttacggcaatatcatcaccacac

SEQ ID NO: 295826 - DNA, 25 bp, probe
ttattactgcaccatgtttacttca

SEQ ID NO: 295827 - DNA, 25 bp, probe
ttttaccccagcagtcagctgtctt

SEQ ID NO: 295828 - DNA, 25 bp, probe
ttttaccccagcagtcagctgtctt

SEQ ID NO: 295829 - DNA, 25 bp, probe
ttttaccctactgatgatgtgttgt

SEQ ID NO: 295830 - DNA, 25 bp, probe
ttttgagcacacactctaagtttgg

SEQ ID NO: 295831 - DNA, 25 bp, probe
ttatggagcccaagtttgagtttgc

SEQ ID NO: 295832 - DNA, 25 bp, probe
ttatcagccaccaggctttggcttc

SEQ ID NO: 295833 - DNA, 25 bp, probe
ttatcagccaccaggctttggcttc

SEQ ID NO: 295834 - DNA, 25 bp, probe
ttatctggatctctgtggttccttc

SEQ ID NO: 295835 - DNA, 25 bp, probe
ttattggcagctgttttattgccat

SEQ ID NO: 295836 - DNA, 25 bp, probe
ttttgtagcatgtttgactttccaa

SEQ ID NO: 295837 - DNA, 25 bp, probe
ttttgctggatgtttggtctgaaag

SEQ ID NO: 295838 - DNA, 25 bp, probe
ttgtgtgcttgaacttttgggacgt

SEQ ID NO: 295839 - DNA, 25 bp, probe
ttttgctgatgatctttatggctac

SEQ ID NO: 295840 - DNA, 25 bp, probe
ttttgctgatgatctttatggctac

SEQ ID NO: 295841 - DNA, 25 bp, probe
tttatgctgaaaatttacctatcca

SEQ ID NO: 295842 - DNA, 25 bp, probe
ttttgtaataaatggcctgatgcta

SEQ ID NO: 295843 - DNA, 25 bp, probe
ttttgccaaaaagttgcctatgttt

SEQ ID NO: 295844 - DNA, 25 bp, probe
ttttgccaaaactgcttgattgttc

SEQ ID NO: 295845 - DNA, 25 bp, probe
tttatccaacaattatgttcatttt

SEQ ID NO: 295846 - DNA, 25 bp, probe
ttttcataagcctttggtatctttc

SEQ ID NO: 295847 - DNA, 25 bp, probe
ttttccaagcccattgtttctgtca

SEQ ID NO: 295848 - DNA, 25 bp, probe
ttttcctactccctcagattatgta

SEQ ID NO: 295849 - DNA, 25 bp, probe
ttttcctatgtgtctccagaattgc

SEQ ID NO: 295850 - DNA, 25 bp, probe
tttattctcagatctgccaggtctc

SEQ ID NO: 295851 - DNA, 25 bp, probe
tttatctcactctagtccaggtgcc

SEQ ID NO: 295852 - DNA, 25 bp, probe
tttatctatgtctgtcatacgctaa

SEQ ID NO: 295853 - DNA, 25 bp, probe
tttatgtcaccagcgcacacgctga

SEQ ID NO: 295854 - DNA, 25 bp, probe
ttttggcagcaatcagcacggacag

SEQ ID NO: 295855 - DNA, 25 bp, probe
ttttggcaaactgctgctgcgactg

SEQ ID NO: 295856 - DNA, 25 bp, probe
ttttgtggaactttgctgtcgtgct

SEQ ID NO: 295857 - DNA, 25 bp, probe
ttttgtggaactttgctgtcgtgct

SEQ ID NO: 295858 - DNA, 25 bp, probe
ttttggagtcctattgtcgtgcatg

SEQ ID NO: 295859 - DNA, 25 bp, probe
ttttgtttcctgtacttcatagctg

SEQ ID NO: 295860 - DNA, 25 bp, probe
ttttgtttcctgtacttcatagctg

SEQ ID NO: 295861 - DNA, 25 bp, probe
ttttgtggtcctgttaatatcatac

SEQ ID NO: 295862 - DNA, 25 bp, probe
tttattgcttcctgtgaaatcacat

SEQ ID NO: 295863 - DNA, 25 bp, probe
tttttcttctgctatgtgacttgca

SEQ ID NO: 295864 - DNA, 25 bp, probe
tttttgcctacatttcctgtgcagc

SEQ ID NO: 295865 - DNA, 25 bp, probe
tttttgcctacatttcctgtgcagc

SEQ ID NO: 295866 - DNA, 25 bp, probe
ttttcaactactttctctacagctt

SEQ ID NO: 295867 - DNA, 25 bp, probe
ttttaatgtatatttgctgcaaaga

SEQ ID NO: 295868 - DNA, 25 bp, probe
tttttagctcatgactctgcaaggc

SEQ ID NO: 295869 - DNA, 25 bp, probe
ttttcttgtctggagtctgcacata

SEQ ID NO: 295870 - DNA, 25 bp, probe
ttttccttctgaagtctgagcccat

SEQ ID NO: 295871 - DNA, 25 bp, probe
ttttcaatcctcaaattagcatcac

SEQ ID NO: 295872 - DNA, 25 bp, probe
ttttatagtctcaaatcaaatacat

SEQ ID NO: 295873 - DNA, 25 bp, probe
ttttcttcttgcagagcaagggcat

SEQ ID NO: 295874 - DNA, 25 bp, probe
ttttcattatttgggtaggtgacct

SEQ ID NO: 295875 - DNA, 25 bp, probe
ttttgtagtcttggcgtaaggacac

SEQ ID NO: 295876 - DNA, 25 bp, probe
ttttggacacttgggtcacctgacc

SEQ ID NO: 295877 - DNA, 25 bp, probe
tttttacacttccttaactgcacga

SEQ ID NO: 295878 - DNA, 25 bp, probe
tttttataaccgctacactacagag

SEQ ID NO: 295879 - DNA, 25 bp, probe
ttatgatctacacccgtttcttaaa

SEQ ID NO: 295880 - DNA, 25 bp, probe
ttaacaactaccttatttttcactg

SEQ ID NO: 295881 - DNA, 25 bp, probe
ttaacaactaccttatttttcactg

SEQ ID NO: 295882 - DNA, 25 bp, probe
ttaaatacacccttattatttagct

SEQ ID NO: 295883 - DNA, 25 bp, probe
ttagaaccccaagtgaaaattagag

SEQ ID NO: 295884 - DNA, 25 bp, probe
ttaacctcctaagtatcaagtatag

SEQ ID NO: 295885 - DNA, 25 bp, probe
ttagccccgctgagcttggaggaag

SEQ ID NO: 295886 - DNA, 25 bp, probe
ttacggcagggatcattgggaaagg

SEQ ID NO: 295887 - DNA, 25 bp, probe
ttatctggggagtatttgggaaaca

SEQ ID NO: 295888 - DNA, 25 bp, probe
ttttgggagtgtttatcgagccaaa

SEQ ID NO: 295889 - DNA, 25 bp, probe
ttattgggttgtttatttatctaag

SEQ ID NO: 295890 - DNA, 25 bp, probe
ttattgggttgtttatttatctaag

SEQ ID NO: 295891 - DNA, 25 bp, probe
ttttactctgtgaactttatttaag

SEQ ID NO: 295892 - DNA, 25 bp, probe
tttatatacctggatctattatgtt

SEQ ID NO: 295893 - DNA, 25 bp, probe
tttataggcctgtgtgtatagctgt

SEQ ID NO: 295894 - DNA, 25 bp, probe
tttatatggcgatggtgctgctaac

SEQ ID NO: 295895 - DNA, 25 bp, probe
ttttcagagctttgggcactcccaa

SEQ ID NO: 295896 - DNA, 25 bp, probe
ttttcactattaatggaggcaccaa

SEQ ID NO: 295897 - DNA, 25 bp, probe
ttttgatgaattacgggacccaaat

SEQ ID NO: 295898 - DNA, 25 bp, probe
tttttaatgtttcatgaccacccat

SEQ ID NO: 295899 - DNA, 25 bp, probe
tttttaatgtttcatgaccacccat

SEQ ID NO: 295900 - DNA, 25 bp, probe
tttttaaatttctcagccatcattt

SEQ ID NO: 295901 - DNA, 25 bp, probe
ttttctaccattttaatctcacttt

SEQ ID NO: 295902 - DNA, 25 bp, probe
ttttctaagcacattcaatccaatt

SEQ ID NO: 295903 - DNA, 25 bp, probe
tttttatcaccttctacatcctggt

SEQ ID NO: 295904 - DNA, 25 bp, probe
tttttcatagccttacagtatctgg

SEQ ID NO: 295905 - DNA, 25 bp, probe
tttttctgatgccaatctcaacatt

SEQ ID NO: 295906 - DNA, 25 bp, probe
ttttcctgacactctcaactgtgca

SEQ ID NO: 295907 - DNA, 25 bp, probe
ttttcaaacattcctcaacttatag

SEQ ID NO: 295908 - DNA, 25 bp, probe
tttataaacagtagcacacaataaa

SEQ ID NO: 295909 - DNA, 25 bp, probe
ttctgaaaatactgtgactcaaaga

SEQ ID NO: 295910 - DNA, 25 bp, probe
ttctggaactactttatctacggat

SEQ ID NO: 295911 - DNA, 25 bp, probe
ttgtaacatctaaacctgccacgga

SEQ ID NO: 295912 - DNA, 25 bp, probe
ttgtaacatctaaacctgccacgga

SEQ ID NO: 295913 - DNA, 25 bp, probe
ttcagaagcacctgaactccacgga

SEQ ID NO: 295914 - DNA, 25 bp, probe
ttgaaacccagggtcgtcacgctgt

SEQ ID NO: 295915 - DNA, 25 bp, probe
ttataaccgagggctggcgttttgg

SEQ ID NO: 295916 - DNA, 25 bp, probe
ttatgaggtaagaagctggcctcct

SEQ ID NO: 295917 - DNA, 25 bp, probe
ttctgacttaggattggccttttga

SEQ ID NO: 295918 - DNA, 25 bp, probe
ttctgtttattgcttacctggcttt

SEQ ID NO: 295919 - DNA, 25 bp, probe
ttctggattattgttccagcattgc

SEQ ID NO: 295920 - DNA, 25 bp, probe
ttttgattgaactatcccagatggt

SEQ ID NO: 295921 - DNA, 25 bp, probe
ttttctggatggttcccagagggtt

SEQ ID NO: 295922 - DNA, 25 bp, probe
ttattcatagtgtttcccacgtggc

SEQ ID NO: 295923 - DNA, 25 bp, probe
ttattcataatctccttcacggcag

SEQ ID NO: 295924 - DNA, 25 bp, probe
ttattaagtctgaacttctggggta

SEQ ID NO: 295925 - DNA, 25 bp, probe
ttattaatgctttggttctgggttg

SEQ ID NO: 295926 - DNA, 25 bp, probe
ttatcacctgtttagcatttgggag

SEQ ID NO: 295927 - DNA, 25 bp, probe
ttttgactttgctagtttgtggcag

SEQ ID NO: 295928 - DNA, 25 bp, probe
ttcactgactctgctaggtggtgcc

SEQ ID NO: 295929 - DNA, 25 bp, probe
tttattgctgtgatagtctgtgtgc

SEQ ID NO: 295930 - DNA, 25 bp, probe
ttatagttgtgaacattgcttgtgt

SEQ ID NO: 295931 - DNA, 25 bp, probe
ttaatactgtcataggcattgcctc

SEQ ID NO: 295932 - DNA, 25 bp, probe
tttatattgataacaggcactgact

SEQ ID NO: 295933 - DNA, 25 bp, probe
tttatattggcatcaggacaatgca

SEQ ID NO: 295934 - DNA, 25 bp, probe
tttatcgagccaaatggatatcaca

SEQ ID NO: 295935 - DNA, 25 bp, probe
ttttagagcaaggctgggcatcagc

SEQ ID NO: 295936 - DNA, 25 bp, probe
tttttcacaatggtggcatcaagca

SEQ ID NO: 295937 - DNA, 25 bp, probe
ttttgtcgcagtcacgatcaactta

SEQ ID NO: 295938 - DNA, 25 bp, probe
ttttgcctgaattacgagcagaaag

SEQ ID NO: 295939 - DNA, 25 bp, probe
ttatgctccaatttacctaatgaat

SEQ ID NO: 295940 - DNA, 25 bp, probe
ttataccaatacactgctaagtagt

SEQ ID NO: 295941 - DNA, 25 bp, probe
ttatatcatttaaaccatactgtag

SEQ ID NO: 295942 - DNA, 25 bp, probe
ttataattgcttccaaacagctggg

SEQ ID NO: 295943 - DNA, 25 bp, probe
tttattctcttactaacatctgtga

SEQ ID NO: 295944 - DNA, 25 bp, probe
tttatctttagacttcacttgtggt

SEQ ID NO: 295945 - DNA, 25 bp, probe
ttttttaagagtgtgtgatgtgtgt

SEQ ID NO: 295946 - DNA, 25 bp, probe
tttttgaaaagtttgcagcttatgt

SEQ ID NO: 295947 - DNA, 25 bp, probe
ttattcttaaagctactggtagtta

SEQ ID NO: 295948 - DNA, 25 bp, probe
ttttctcttcaatgtcactagtaag

SEQ ID NO: 295949 - DNA, 25 bp, probe
ttttctctagagtcagtcattatga

SEQ ID NO: 295950 - DNA, 25 bp, probe
tttattccagcattcgatgcatttt

SEQ ID NO: 295951 - DNA, 25 bp, probe
tttttcactgcattctagttgtggt

SEQ ID NO: 295952 - DNA, 25 bp, probe
tttttcattgcatttggatgcctgg

SEQ ID NO: 295953 - DNA, 25 bp, probe
ttttctcattgccaatggcctccta

SEQ ID NO: 295954 - DNA, 25 bp, probe
ttttctgctgggaatcacactcctg

SEQ ID NO: 295955 - DNA, 25 bp, probe
tttttctgtgacatcactcctgtcc

SEQ ID NO: 295956 - DNA, 25 bp, probe
ttttctcggaaaactgtcttgcagc

SEQ ID NO: 295957 - DNA, 25 bp, probe
tttttgaggcgaaggcgtctgtctc

SEQ ID NO: 295958 - DNA, 25 bp, probe
ttctttggctggagccggttcatcc

SEQ ID NO: 295959 - DNA, 25 bp, probe
ttctttggctggagccggttcatcc

SEQ ID NO: 295960 - DNA, 25 bp, probe
ttcttgggttaatccatgttcaatt

SEQ ID NO: 295961 - DNA, 25 bp, probe
ttttcaggttagtacgtgttcttct

SEQ ID NO: 295962 - DNA, 25 bp, probe
ttcttaggctttcagtggtttgttc

SEQ ID NO: 295963 - DNA, 25 bp, probe
ttcttaggctttcagtggtttgttc

SEQ ID NO: 295964 - DNA, 25 bp, probe
ttttatgcctggtaagtggcttttt

SEQ ID NO: 295965 - DNA, 25 bp, probe
ttttttctggaatctcactcttgtt

SEQ ID NO: 295966 - DNA, 25 bp, probe
ttttgttttgagttccctcattctt

SEQ ID NO: 295967 - DNA, 25 bp, probe
tttattttggcaagtctttcgtctt

SEQ ID NO: 295968 - DNA, 25 bp, probe
tttttcatcatccaagtttgtagtt

SEQ ID NO: 295969 - DNA, 25 bp, probe
tttttcatcttctctggcgacagtt

SEQ ID NO: 295970 - DNA, 25 bp, probe
tttttctactatccttgctaagttt

SEQ ID NO: 295971 - DNA, 25 bp, probe
ttttgtcgcagctttgctttgttta

SEQ ID NO: 295972 - DNA, 25 bp, probe
tttattctatgctagtttctttcta

SEQ ID NO: 295973 - DNA, 25 bp, probe
ttttttcatgtagtttcttaatata

SEQ ID NO: 295974 - DNA, 25 bp, probe
tttttcttatgagttttctaatcat

SEQ ID NO: 295975 - DNA, 25 bp, probe
tttttctttgactcatttggactga

SEQ ID NO: 295976 - DNA, 25 bp, probe
ttttcttggtattaatttggccgca

SEQ ID NO: 295977 - DNA, 25 bp, probe
ttttccggcacatgaattgggacga

SEQ ID NO: 295978 - DNA, 25 bp, probe
ttttccaggcaatgacgtcgatgac

SEQ ID NO: 295979 - DNA, 25 bp, probe
ttttctagggatagacgcccaggga

SEQ ID NO: 295980 - DNA, 25 bp, probe
ttttctagggatagacgcccaggga

SEQ ID NO: 295981 - DNA, 25 bp, probe
ttatttatggtgtgaccccctggag

SEQ ID NO: 295982 - DNA, 25 bp, probe
ttatttattgggaacccctgcaggg

SEQ ID NO: 295983 - DNA, 25 bp, probe
ttttcttgggagagtcactccagcc

SEQ ID NO: 295984 - DNA, 25 bp, probe
ttttctttgaagagcccatcctcac

SEQ ID NO: 295985 - DNA, 25 bp, probe
ttttcttttaagcccagtacatata

SEQ ID NO: 295986 - DNA, 25 bp, probe
ttttatttcatgttgcccagtaaaa

SEQ ID NO: 295987 - DNA, 25 bp, probe
ttttgacacttgttgtccagttgaa

SEQ ID NO: 295988 - DNA, 25 bp, probe
ttttgtcactatctgtcaagactga

SEQ ID NO: 295989 - DNA, 25 bp, probe
ttttgatctcaatgtgtaaaatgac

SEQ ID NO: 295990 - DNA, 25 bp, probe
ttcttggctaaagtgtacaacccta

SEQ ID NO: 295991 - DNA, 25 bp, probe
ttcttggctaaagtgtacaacccta

SEQ ID NO: 295992 - DNA, 25 bp, probe
ttttgcctaaatggagtataccttg

SEQ ID NO: 295993 - DNA, 25 bp, probe
ttttcttacatcagatgtttctttg

SEQ ID NO: 295994 - DNA, 25 bp, probe
ttttcttccatacgattgttataga

SEQ ID NO: 295995 - DNA, 25 bp, probe
ttttttcctcattgttggggatgat

SEQ ID NO: 295996 - DNA, 25 bp, probe
ttttctatgcctccatttggggatt

SEQ ID NO: 295997 - DNA, 25 bp, probe
ttttctgatagcactttgaggatat

SEQ ID NO: 295998 - DNA, 25 bp, probe
tttttgaagcaactcatcgattgat

SEQ ID NO: 295999 - DNA, 25 bp, probe
ttttgaagcaactcatcgattgatt

SEQ ID NO: 296000 - DNA, 25 bp, probe
ttttgaactcagccatctctatata

SEQ ID NO: 296001 - DNA, 25 bp, probe
tttttgtctcagcatcagtatatcc

SEQ ID NO: 296002 - DNA, 25 bp, probe
ttttttctctggtggcattccttta

SEQ ID NO: 296003 - DNA, 25 bp, probe
tttttgtcttgggaggcaccgtact

SEQ ID NO: 296004 - DNA, 25 bp, probe
tttttgtcttgggaggcaccgtact

SEQ ID NO: 296005 - DNA, 25 bp, probe
tttttctcattgccaatggcctcct

SEQ ID NO: 296006 - DNA, 25 bp, probe
ttttctcgcatccaaatgtgctccc

SEQ ID NO: 296007 - DNA, 25 bp, probe
ttcttcacgaaacaaatcccctgtg

SEQ ID NO: 296008 - DNA, 25 bp, probe
ttcttcactaaattaaaaacggctg

SEQ ID NO: 296009 - DNA, 25 bp, probe
ttttcttttcaataagtacagcagt

SEQ ID NO: 296010 - DNA, 25 bp, probe
ttttcttttcaataagtacagcagt

SEQ ID NO: 296011 - DNA, 25 bp, probe
ttttcttctgtcaccaaaagaggtc

SEQ ID NO: 296012 - DNA, 25 bp, probe
ttttcctgctgtatccagaagaaat

SEQ ID NO: 296013 - DNA, 25 bp, probe
ttttcctgctgtatccagaagaaat

SEQ ID NO: 296014 - DNA, 25 bp, probe
ttttcctgatgtatttgataaacaa

SEQ ID NO: 296015 - DNA, 25 bp, probe
ttttctcttttaagatgtaagatgc

SEQ ID NO: 296016 - DNA, 25 bp, probe
tttttctccatcaacagtgaaagga

SEQ ID NO: 296017 - DNA, 25 bp, probe
ttatttcccagtcctctcagaaagt

SEQ ID NO: 296018 - DNA, 25 bp, probe
ttattaaatagtcactagtattgct

SEQ ID NO: 296019 - DNA, 25 bp, probe
ttgttgaacggtccactttctttga

SEQ ID NO: 296020 - DNA, 25 bp, probe
ttgttgaacggtccactttctttga

SEQ ID NO: 296021 - DNA, 25 bp, probe
ttttaatcaggcagagttttatgga

SEQ ID NO: 296022 - DNA, 25 bp, probe
ttttaatcaggcagagttttatgga

SEQ ID NO: 296023 - DNA, 25 bp, probe
ttttccattctgggtgttttcagaa

SEQ ID NO: 296024 - DNA, 25 bp, probe
ttttcccatctcaggtgtgttgcag

SEQ ID NO: 296025 - DNA, 25 bp, probe
ttttctccttatctgtgcagtacag

SEQ ID NO: 296026 - DNA, 25 bp, probe
ttttgcttcttctcaggaatacagt

SEQ ID NO: 296027 - DNA, 25 bp, probe
ttttgctctttatcagaatgtgaat

SEQ ID NO: 296028 - DNA, 25 bp, probe
ttttgtgttctgtcaccaactgaag

SEQ ID NO: 296029 - DNA, 25 bp, probe
ttttctgtttgtactgatactagac

SEQ ID NO: 296030 - DNA, 25 bp, probe
ttttgtggttatattcccaacaaca

SEQ ID NO: 296031 - DNA, 25 bp, probe
ttttgctgcttctggttcccagaaa

SEQ ID NO: 296032 - DNA, 25 bp, probe
ttttgccatcctaggcttaaatgca

SEQ ID NO: 296033 - DNA, 25 bp, probe
ttttgctcccatagtatccaagaca

SEQ ID NO: 296034 - DNA, 25 bp, probe
ttttggagccaagttcccaatcaag

SEQ ID NO: 296035 - DNA, 25 bp, probe
ttttggagccaagttcccaatcaag

SEQ ID NO: 296036 - DNA, 25 bp, probe
ttatagggcccgtgccataattggg

SEQ ID NO: 296037 - DNA, 25 bp, probe
ttatagggcccgtgccataattggg

SEQ ID NO: 296038 - DNA, 25 bp, probe
ttcacagggcccaggtaaaccaagc

SEQ ID NO: 296039 - DNA, 25 bp, probe
ttgggggctcccagttacagaaagg

SEQ ID NO: 296040 - DNA, 25 bp, probe
ttgacgggcctggagggtattaaag

SEQ ID NO: 296041 - DNA, 25 bp, probe
ttaggaggaccatgtggttggaagg

SEQ ID NO: 296042 - DNA, 25 bp, probe
ttaggaggaccatgtggttggaagg

SEQ ID NO: 296043 - DNA, 25 bp, probe
ttattggggccttgtggcttgtcca

SEQ ID NO: 296044 - DNA, 25 bp, probe
ttttgatggtgtctgtgacatttcc

SEQ ID NO: 296045 - DNA, 25 bp, probe
ttattgagggtgcggacgcgtcatc

SEQ ID NO: 296046 - DNA, 25 bp, probe
ttagtgagggggaagaccatgtctg

SEQ ID NO: 296047 - DNA, 25 bp, probe
ttcagctgcaagaggaaggcaaact

SEQ ID NO: 296048 - DNA, 25 bp, probe
ttagctgcatagtggaagaggagag

SEQ ID NO: 296049 - DNA, 25 bp, probe
ttttgtccacaggtatgaggtagat

SEQ ID NO: 296050 - DNA, 25 bp, probe
ttttgtacacatggataccgctcaa

SEQ ID NO: 296051 - DNA, 25 bp, probe
ttattgctgcaactggcaaacctgc

SEQ ID NO: 296052 - DNA, 25 bp, probe
ttatacctactttacccatgatgaa

SEQ ID NO: 296053 - DNA, 25 bp, probe
ttagggtgcccttacttcagcaaag

SEQ ID NO: 296054 - DNA, 25 bp, probe
ttaagttcaccgtagtaacacataa

SEQ ID NO: 296055 - DNA, 25 bp, probe
ttaagttcaccgtagtaacacataa

SEQ ID NO: 296056 - DNA, 25 bp, probe
ttacactacaccctcaaaagctaga

SEQ ID NO: 296057 - DNA, 25 bp, probe
ttacaccacgacccaatgtacttag

SEQ ID NO: 296058 - DNA, 25 bp, probe
ttacaccacgacccaatgtacttag

SEQ ID NO: 296059 - DNA, 25 bp, probe
ttttccacctcgtcaattgatttga

SEQ ID NO: 296060 - DNA, 25 bp, probe
tttttcacctaagtcatctttgagg

SEQ ID NO: 296061 - DNA, 25 bp, probe
tttttcacagtaaaccatgtaagtg

SEQ ID NO: 296062 - DNA, 25 bp, probe
tttttcagtgtaacaacattatctg

SEQ ID NO: 296063 - DNA, 25 bp, probe
ttattatcagttaaaatcacatttt

SEQ ID NO: 296064 - DNA, 25 bp, probe
tttttcactgtgacattatccaagt

SEQ ID NO: 296065 - DNA, 25 bp, probe
ttattgtctttggcattaacagtgt

SEQ ID NO: 296066 - DNA, 25 bp, probe
ttatgattccttgccttattcattt

SEQ ID NO: 296067 - DNA, 25 bp, probe
ttagtgtcacttacttcttttcatt

SEQ ID NO: 296068 - DNA, 25 bp, probe
ttttctacattaatcagtgttttct

SEQ ID NO: 296069 - DNA, 25 bp, probe
ttttctatttgaacatgtgcctttt

SEQ ID NO: 296070 - DNA, 25 bp, probe
tttttttatatacttcaactttctg

SEQ ID NO: 296071 - DNA, 25 bp, probe
ttttctgttattcttcatacctacc

SEQ ID NO: 296072 - DNA, 25 bp, probe
ttttatttgcctctactacgtcagg

SEQ ID NO: 296073 - DNA, 25 bp, probe
ttttttcatgccccatactactgaa

SEQ ID NO: 296074 - DNA, 25 bp, probe
tttttatgcattgtcacctcctaca

SEQ ID NO: 296075 - DNA, 25 bp, probe
ttttttgctgatgtgtgctctctct

SEQ ID NO: 296076 - DNA, 25 bp, probe
ttttttgctgatgtgtgctctctct

SEQ ID NO: 296077 - DNA, 25 bp, probe
ttttagctgtgatgcaggtcctctc

SEQ ID NO: 296078 - DNA, 25 bp, probe
ttttgactggaccgagtgactacta

SEQ ID NO: 296079 - DNA, 25 bp, probe
ttttgccaggaacagtaccctcaac

SEQ ID NO: 296080 - DNA, 25 bp, probe
ttttcaaagtactagatcaccttaa

SEQ ID NO: 296081 - DNA, 25 bp, probe
ttctattaactttaattctctttca

SEQ ID NO: 296082 - DNA, 25 bp, probe
tttttatttttaggtctctgtccat

SEQ ID NO: 296083 - DNA, 25 bp, probe
ttttctctgtttcacgttcgttgag

SEQ ID NO: 296084 - DNA, 25 bp, probe
ttttctctgttttatgctcttgtgt

SEQ ID NO: 296085 - DNA, 25 bp, probe
ttttggcaatttgtttctctgttcc

SEQ ID NO: 296086 - DNA, 25 bp, probe
ttttggcaatttgtttctctgttcc

SEQ ID NO: 296087 - DNA, 25 bp, probe
ttttgaaattgtgtactcccttgta

SEQ ID NO: 296088 - DNA, 25 bp, probe
ttttgaagttgcagtccatcacctt

SEQ ID NO: 296089 - DNA, 25 bp, probe
ttattgaatgggtgaacaacactgc

SEQ ID NO: 296090 - DNA, 25 bp, probe
ttacccagggatgaccaacccggag

SEQ ID NO: 296091 - DNA, 25 bp, probe
ttacccagggatgtcaaaccctgaa

SEQ ID NO: 296092 - DNA, 25 bp, probe
ttccaggaaagtgtgaagacccaaa

SEQ ID NO: 296093 - DNA, 25 bp, probe
ttccaggaaagtgtgaagacccaaa

SEQ ID NO: 296094 - DNA, 25 bp, probe
ttgggtcaagggatgaagacctgca

SEQ ID NO: 296095 - DNA, 25 bp, probe
ttatggaggaagcatggaagaaatg

SEQ ID NO: 296096 - DNA, 25 bp, probe
ttaccggaacgaaatagcttatttg

SEQ ID NO: 296097 - DNA, 25 bp, probe
ttaccgtgaacgcatcaccattctt

SEQ ID NO: 296098 - DNA, 25 bp, probe
ttaccgccaagtgaactgcttttcc

SEQ ID NO: 296099 - DNA, 25 bp, probe
ttaccgccaagtgaactgcttttcc

SEQ ID NO: 296100 - DNA, 25 bp, probe
ttgccccctgagggacggttttgct

SEQ ID NO: 296101 - DNA, 25 bp, probe
ttgccccctgagggacggttttgct

SEQ ID NO: 296102 - DNA, 25 bp, probe
ttcaggcccggaggagggtttgcgg

SEQ ID NO: 296103 - DNA, 25 bp, probe
ttagaccaagttgaggtctgttctg

SEQ ID NO: 296104 - DNA, 25 bp, probe
ttatgaaattttgtggtggtgccat

SEQ ID NO: 296105 - DNA, 25 bp, probe
ttttaatttatgtctggagcctggc

SEQ ID NO: 296106 - DNA, 25 bp, probe
ttttaagttgctcaggagcctgatg

SEQ ID NO: 296107 - DNA, 25 bp, probe
ttttatctgaagtgaggagcaccag

SEQ ID NO: 296108 - DNA, 25 bp, probe
ttttatctgaagtgaggagcaccag

SEQ ID NO: 296109 - DNA, 25 bp, probe
ttttatgtagagagggcgccacact

SEQ ID NO: 296110 - DNA, 25 bp, probe
ttttgggagctgtgggcgcaacccc

SEQ ID NO: 296111 - DNA, 25 bp, probe
ttatacggactatgtggccacacgc

SEQ ID NO: 296112 - DNA, 25 bp, probe
ttatccgttccatgggtgaagctcc

SEQ ID NO: 296113 - DNA, 25 bp, probe
ttattaattccaagggcataccccg

SEQ ID NO: 296114 - DNA, 25 bp, probe
tttttcttcccaggcaatacacctc

SEQ ID NO: 296115 - DNA, 25 bp, probe
tttttcttcccaggcaatacacctc

SEQ ID NO: 296116 - DNA, 25 bp, probe
ttatttttgtcacggaaagcatcct

SEQ ID NO: 296117 - DNA, 25 bp, probe
ttttattttcaggctcaacctactg

SEQ ID NO: 296118 - DNA, 25 bp, probe
tttttatttcacgttaccatgccat

SEQ ID NO: 296119 - DNA, 25 bp, probe
ttttaggactcacgttaactcacat

SEQ ID NO: 296120 - DNA, 25 bp, probe
ttttatggttcatgttatatcctcc

SEQ ID NO: 296121 - DNA, 25 bp, probe
ttttggagttgctctttcacttcca

SEQ ID NO: 296122 - DNA, 25 bp, probe
ttttgtagcctgcttttgctttcac

SEQ ID NO: 296123 - DNA, 25 bp, probe
ttttgatacctaatgtaagttttct

SEQ ID NO: 296124 - DNA, 25 bp, probe
ttactgtaactgattacacttggta

SEQ ID NO: 296125 - DNA, 25 bp, probe
ttactgtaactgattacacttggta

SEQ ID NO: 296126 - DNA, 25 bp, probe
ttttgtgaagtgaacaatactttgt

SEQ ID NO: 296127 - DNA, 25 bp, probe
ttttgagaatgctgacactttttca

SEQ ID NO: 296128 - DNA, 25 bp, probe
ttatcgtgaacttgtcctcttaaaa

SEQ ID NO: 296129 - DNA, 25 bp, probe
ttttggctttggaactctttgaaca

SEQ ID NO: 296130 - DNA, 25 bp, probe
ttaaggtgttggaatccctgggcaa

SEQ ID NO: 296131 - DNA, 25 bp, probe
ttatagagtggttttgtcctgcagt

SEQ ID NO: 296132 - DNA, 25 bp, probe
ttttagagctttttgtcactatctg

SEQ ID NO: 296133 - DNA, 25 bp, probe
ttttagcttttcttctactggcttg

SEQ ID NO: 296134 - DNA, 25 bp, probe
ttttagcttgttttacctacatcta

SEQ ID NO: 296135 - DNA, 25 bp, probe
ttttcgtcgaattctaccgtgcttg

SEQ ID NO: 296136 - DNA, 25 bp, probe
ttgttttggaatttaccggctgaga

SEQ ID NO: 296137 - DNA, 25 bp, probe
ttgtccggagatacctactcaggcg

SEQ ID NO: 296138 - DNA, 25 bp, probe
ttttcaggctcaacctactgacagc

SEQ ID NO: 296139 - DNA, 25 bp, probe
ttttcaggctacatgcaacagtgga

SEQ ID NO: 296140 - DNA, 25 bp, probe
ttttcactgcattttgcatgggatg

SEQ ID NO: 296141 - DNA, 25 bp, probe
ttttcctcattgttggggatgatga

SEQ ID NO: 296142 - DNA, 25 bp, probe
ttttccgcgtgtcggaggagcagca

SEQ ID NO: 296143 - DNA, 25 bp, probe
ttttccagtaggggagtcagcacta

SEQ ID NO: 296144 - DNA, 25 bp, probe
ttttccagtaggggagtcagcacta

SEQ ID NO: 296145 - DNA, 25 bp, probe
ttttccagtaaggtatgttgccaga

SEQ ID NO: 296146 - DNA, 25 bp, probe
ttttccagtaaggtatgttgccaga

SEQ ID NO: 296147 - DNA, 25 bp, probe
ttttcaattacatgttgcttccaga

SEQ ID NO: 296148 - DNA, 25 bp, probe
ttttgctattttgtctgctgtccag

SEQ ID NO: 296149 - DNA, 25 bp, probe
ttttccttgtgtgtagctgctcgga

SEQ ID NO: 296150 - DNA, 25 bp, probe
ttttccttgtgtgtagctgctcgga

SEQ ID NO: 296151 - DNA, 25 bp, probe
ttttgccttggtttcactggggaga

SEQ ID NO: 296152 - DNA, 25 bp, probe
ttttcctttagatttcctggtgaag

SEQ ID NO: 296153 - DNA, 25 bp, probe
ttttcgatataaaataccgagggca

SEQ ID NO: 296154 - DNA, 25 bp, probe
ttttacatcggagcacaccgagggc

SEQ ID NO: 296155 - DNA, 25 bp, probe
ttttcaagaggaacatatgcctgag

SEQ ID NO: 296156 - DNA, 25 bp, probe
ttttcacatcaccaagacagcctac

SEQ ID NO: 296157 - DNA, 25 bp, probe
ttttcacatcaccaagacagcctac

SEQ ID NO: 296158 - DNA, 25 bp, probe
ttttgacaactgccatgaactctac

SEQ ID NO: 296159 - DNA, 25 bp, probe
ttttgactctggccagaacctcagc

SEQ ID NO: 296160 - DNA, 25 bp, probe
ttattgaccttccatggtcctcact

SEQ ID NO: 296161 - DNA, 25 bp, probe
ttattgaccttccatggtcctcact

SEQ ID NO: 296162 - DNA, 25 bp, probe
ttattactgttttgggcctccatgc

SEQ ID NO: 296163 - DNA, 25 bp, probe
ttttcagctttagggtcctgcttca

SEQ ID NO: 296164 - DNA, 25 bp, probe
ttttcacttttggcaatgactcaaa

SEQ ID NO: 296165 - DNA, 25 bp, probe
ttttgatttgttacactagtgcata

SEQ ID NO: 296166 - DNA, 25 bp, probe
ttttgttattgatatctcggataca

SEQ ID NO: 296167 - DNA, 25 bp, probe
ttttgttattgatatctcggataca

SEQ ID NO: 296168 - DNA, 25 bp, probe
ttttgttttatttccctgagcacca

SEQ ID NO: 296169 - DNA, 25 bp, probe
ttttgtttgatattttcctgatgca

SEQ ID NO: 296170 - DNA, 25 bp, probe
ttttctcattgtctttttgcatcag

SEQ ID NO: 296171 - DNA, 25 bp, probe
ttttgcatcatgagtattttactag

SEQ ID NO: 296172 - DNA, 25 bp, probe
ttttgatgctgctgattcctttctc

SEQ ID NO: 296173 - DNA, 25 bp, probe
ttttggtctctaccattttctgctt

SEQ ID NO: 296174 - DNA, 25 bp, probe
ttttattcagcatcctttatctgtg

SEQ ID NO: 296175 - DNA, 25 bp, probe
tttttttgcattcctgataattgta

SEQ ID NO: 296176 - DNA, 25 bp, probe
ttatttgctttcagcagagaattta

SEQ ID NO: 296177 - DNA, 25 bp, probe
ttgatttgtttagactgaaggaaga

SEQ ID NO: 296178 - DNA, 25 bp, probe
ttatactgttaaaagctggtgggag

SEQ ID NO: 296179 - DNA, 25 bp, probe
ttatttgtgcattttattgactggg

SEQ ID NO: 296180 - DNA, 25 bp, probe
ttattcgtcattacctggcagaggc

SEQ ID NO: 296181 - DNA, 25 bp, probe
ttttgcagccgcacactgagaaagc

SEQ ID NO: 296182 - DNA, 25 bp, probe
ttttggcagcagcacatctaacgag

SEQ ID NO: 296183 - DNA, 25 bp, probe
ttttgtaccaaagtcaactgcacgt

SEQ ID NO: 296184 - DNA, 25 bp, probe
ttgatttccccatcgagactgtggt

SEQ ID NO: 296185 - DNA, 25 bp, probe
ttttctctcctatcagtgtatgctg

SEQ ID NO: 296186 - DNA, 25 bp, probe
ttttctgctaattcgagtcatggct

SEQ ID NO: 296187 - DNA, 25 bp, probe
ttttccttgatagggtgctgccatg

SEQ ID NO: 296188 - DNA, 25 bp, probe
ttttccttgctatcaggatgcatag

SEQ ID NO: 296189 - DNA, 25 bp, probe
ttttcctattcatcaggctgtactt

SEQ ID NO: 296190 - DNA, 25 bp, probe
ttattcactttcactggtgcacact

SEQ ID NO: 296191 - DNA, 25 bp, probe
ttattcttttagtctgtttgcctaa

SEQ ID NO: 296192 - DNA, 25 bp, probe
ttttctttcttggccgtgagcctaa

SEQ ID NO: 296193 - DNA, 25 bp, probe
ttttccatgtgaaaacctgagccta

SEQ ID NO: 296194 - DNA, 25 bp, probe
ttttccagatttttcactagcgtac

SEQ ID NO: 296195 - DNA, 25 bp, probe
ttttcctgaacttgtgactacgaga

SEQ ID NO: 296196 - DNA, 25 bp, probe
ttttcctgaacttgtgactacgaga

SEQ ID NO: 296197 - DNA, 25 bp, probe
ttttcctggacacttactggcatgg

SEQ ID NO: 296198 - DNA, 25 bp, probe
ttttcccagatgtttacagactgtg

SEQ ID NO: 296199 - DNA, 25 bp, probe
ttttcatccatgtttttaattatta

SEQ ID NO: 296200 - DNA, 25 bp, probe
ttttcattatattattccacatatt

SEQ ID NO: 296201 - DNA, 25 bp, probe
ttttataacttatccatatgcatga

SEQ ID NO: 296202 - DNA, 25 bp, probe
ttttatgtactttgtccttcagcaa

SEQ ID NO: 296203 - DNA, 25 bp, probe
ttttttatgatttgtctctgtcacc

SEQ ID NO: 296204 - DNA, 25 bp, probe
ttttctctcagttgggatgcttcac

SEQ ID NO: 296205 - DNA, 25 bp, probe
ttattcctcagattgctgaatccca

SEQ ID NO: 296206 - DNA, 25 bp, probe
ttttcatcatgctgatctgcaatgc

SEQ ID NO: 296207 - DNA, 25 bp, probe
ttatccatatgcctttgcaataact

SEQ ID NO: 296208 - DNA, 25 bp, probe
ttatccatatgcctttgcaataact

SEQ ID NO: 296209 - DNA, 25 bp, probe
ttttctgtgcagccactgttaagcc

SEQ ID NO: 296210 - DNA, 25 bp, probe
ttttctgtgcagccactgttaagcc

SEQ ID NO: 296211 - DNA, 25 bp, probe
ttttctttggcactcttactgcctg

SEQ ID NO: 296212 - DNA, 25 bp, probe
ttttgccatgggttcttcactgacc

SEQ ID NO: 296213 - DNA, 25 bp, probe
ttttcagcacagggctctttctgac

SEQ ID NO: 296214 - DNA, 25 bp, probe
ttttacatggcttctttaatgaatc

SEQ ID NO: 296215 - DNA, 25 bp, probe
ttttttcttactaggtcatgttcac

SEQ ID NO: 296216 - DNA, 25 bp, probe
ttttctttcagacagagaagattac

SEQ ID NO: 296217 - DNA, 25 bp, probe
ttttctttcaacagtgacatgatta

SEQ ID NO: 296218 - DNA, 25 bp, probe
ttttctgattcatgttagactttga

SEQ ID NO: 296219 - DNA, 25 bp, probe
ttttctgtatgatgttactttatgt

SEQ ID NO: 296220 - DNA, 25 bp, probe
ttttcattttggatattctcctgtt

SEQ ID NO: 296221 - DNA, 25 bp, probe
ttttattgttaactcttgtctattt

SEQ ID NO: 296222 - DNA, 25 bp, probe
ttttcattttacatcctctctattg

SEQ ID NO: 296223 - DNA, 25 bp, probe
ttattattctttggtccctcaattt

SEQ ID NO: 296224 - DNA, 25 bp, probe
ttttttctctgagtatctcctcgca

SEQ ID NO: 296225 - DNA, 25 bp, probe
ttttttctcttcaatgtcactagta

SEQ ID NO: 296226 - DNA, 25 bp, probe
ttttgtttttgcagccttgatggaa

SEQ ID NO: 296227 - DNA, 25 bp, probe
ttttgtatttggcaactgtgggcaa

SEQ ID NO: 296228 - DNA, 25 bp, probe
ttttgtctacggaagcctctgggtg

SEQ ID NO: 296229 - DNA, 25 bp, probe
ttttgtctacggaagcctctgggtg

SEQ ID NO: 296230 - DNA, 25 bp, probe
ttttcttactggagcttcattttgg

SEQ ID NO: 296231 - DNA, 25 bp, probe
ttttcttcgcttgtttatttattca

SEQ ID NO: 296232 - DNA, 25 bp, probe
ttctttacgttgttcattatttaat

SEQ ID NO: 296233 - DNA, 25 bp, probe
ttttaaaatatgttcctgattgtac

SEQ ID NO: 296234 - DNA, 25 bp, probe
ttttaacacatagcgccgtgctgta

SEQ ID NO: 296235 - DNA, 25 bp, probe
ttatggaccaatgccccagttgtca

SEQ ID NO: 296236 - DNA, 25 bp, probe
ttaaacgagaagccccggctgtcat

SEQ ID NO: 296237 - DNA, 25 bp, probe
ttaagtgccaatgggcccacctttt

SEQ ID NO: 296238 - DNA, 25 bp, probe
ttaaggacaactcctacctgtacct

SEQ ID NO: 296239 - DNA, 25 bp, probe
ttccaagcattactttaacctccct

SEQ ID NO: 296240 - DNA, 25 bp, probe
ttctcaaacctatgtagacccctct

SEQ ID NO: 296241 - DNA, 25 bp, probe
ttctgaaacctttaaccatgccaat

SEQ ID NO: 296242 - DNA, 25 bp, probe
ttaatggacctttccagcaccgaaa

SEQ ID NO: 296243 - DNA, 25 bp, probe
ttgaatggacctctataaacgcaag

SEQ ID NO: 296244 - DNA, 25 bp, probe
ttgccggagcctctaagccaaagag

SEQ ID NO: 296245 - DNA, 25 bp, probe
ttttggaagcgaaagacccaagatg

SEQ ID NO: 296246 - DNA, 25 bp, probe
ttttggcggctaaatcatcccaatt

SEQ ID NO: 296247 - DNA, 25 bp, probe
ttttggcggctaaatcatcccaatt

SEQ ID NO: 296248 - DNA, 25 bp, probe
ttttggcacagccaaagcccgctat

SEQ ID NO: 296249 - DNA, 25 bp, probe
ttgtgggccgggaagaatcgctatc

SEQ ID NO: 296250 - DNA, 25 bp, probe
ttgatgtggtcgtgtaaatatgtac

SEQ ID NO: 296251 - DNA, 25 bp, probe
ttttgttctgagctccataagaact

SEQ ID NO: 296252 - DNA, 25 bp, probe
ttttcgtgctatttctataaaatct

SEQ ID NO: 296253 - DNA, 25 bp, probe
ttttatggccatttactgaaaaaat

SEQ ID NO: 296254 - DNA, 25 bp, probe
ttttatggccatttactgaaaaaat

SEQ ID NO: 296255 - DNA, 25 bp, probe
ttggtgtggttttactagaaataat

SEQ ID NO: 296256 - DNA, 25 bp, probe
ttttgttgtttatcaggaaatccat

SEQ ID NO: 296257 - DNA, 25 bp, probe
ttttgttgtttatcaggaaatccat

SEQ ID NO: 296258 - DNA, 25 bp, probe
ttttcttgtttatacgttcattcta

SEQ ID NO: 296259 - DNA, 25 bp, probe
ttttcttgtttatacgttcattcta

SEQ ID NO: 296260 - DNA, 25 bp, probe
ttttcttttcttgcactgatctttc

SEQ ID NO: 296261 - DNA, 25 bp, probe
ttttacatttttggcacataacaac

SEQ ID NO: 296262 - DNA, 25 bp, probe
ttttactttctgttgccacaaccct

SEQ ID NO: 296263 - DNA, 25 bp, probe
ttttgactcttgcaatccacaatct

SEQ ID NO: 296264 - DNA, 25 bp, probe
ttttgccatattaaatcttcctcat

SEQ ID NO: 296265 - DNA, 25 bp, probe
ttattgcctactatttgtcctttct

SEQ ID NO: 296266 - DNA, 25 bp, probe
ttttactagctttttcattgtcttt

SEQ ID NO: 296267 - DNA, 25 bp, probe
ttttatgttcttggctttgtgtttt

SEQ ID NO: 296268 - DNA, 25 bp, probe
ttattgtttccttgccttggttgat

SEQ ID NO: 296269 - DNA, 25 bp, probe
ttttaaagccttgctctgttgtgtc

SEQ ID NO: 296270 - DNA, 25 bp, probe
ttttctgataggctaccagtgtgtg

SEQ ID NO: 296271 - DNA, 25 bp, probe
ttttctgataggctaccagtgtgtg

SEQ ID NO: 296272 - DNA, 25 bp, probe
ttttcacattggctccatcactggt

SEQ ID NO: 296273 - DNA, 25 bp, probe
ttttaaatgagcctgacacctgtgt

SEQ ID NO: 296274 - DNA, 25 bp, probe
ttttacaagatcagatactgctgct

SEQ ID NO: 296275 - DNA, 25 bp, probe
ttttcttctgctatgtgacttgcat

SEQ ID NO: 296276 - DNA, 25 bp, probe
ttttcatccttcatctgattccaga

SEQ ID NO: 296277 - DNA, 25 bp, probe
ttttctttcctcagatcatccagaa

SEQ ID NO: 296278 - DNA, 25 bp, probe
ttttctttcctcagatcatccagaa

SEQ ID NO: 296279 - DNA, 25 bp, probe
ttttcatttccagagagcttcataa

SEQ ID NO: 296280 - DNA, 25 bp, probe
ttttagtttctgcaacattcaatga

SEQ ID NO: 296281 - DNA, 25 bp, probe
ttattttttcatccaacttccattt

SEQ ID NO: 296282 - DNA, 25 bp, probe
ttttgtttgatcccacagcaatcca

SEQ ID NO: 296283 - DNA, 25 bp, probe
ttttgaatgtacacagcgaaccaca

SEQ ID NO: 296284 - DNA, 25 bp, probe
ttttccagagcagccggaacctgca

SEQ ID NO: 296285 - DNA, 25 bp, probe
ttttggagcagagccaagcaactcc

SEQ ID NO: 296286 - DNA, 25 bp, probe
ttatatggaccagtggccggacctc

SEQ ID NO: 296287 - DNA, 25 bp, probe
ttattggctgccatggctctggcac

SEQ ID NO: 296288 - DNA, 25 bp, probe
ttttgtgcacagagatctggctgca

SEQ ID NO: 296289 - DNA, 25 bp, probe
ttttgcgacatgacggtgatgctga

SEQ ID NO: 296290 - DNA, 25 bp, probe
ttttgtgaagcacagtgagtgacaa

SEQ ID NO: 296291 - DNA, 25 bp, probe
ttttggatagtcttgtgattctcag

SEQ ID NO: 296292 - DNA, 25 bp, probe
ttttggataatggtggttctggata

SEQ ID NO: 296293 - DNA, 25 bp, probe
ttttggacaaggagttctggtgaca

SEQ ID NO: 296294 - DNA, 25 bp, probe
ttggggacgaagcgtatcagcgtaa

SEQ ID NO: 296295 - DNA, 25 bp, probe
ttgggggtagcggggtcaggacaat

SEQ ID NO: 296296 - DNA, 25 bp, probe
ttgagtacgtcaacggcggggacct

SEQ ID NO: 296297 - DNA, 25 bp, probe
ttagagacgattacaagcggaggcg

SEQ ID NO: 296298 - DNA, 25 bp, probe
ttataactgcatagtaatagggccc

SEQ ID NO: 296299 - DNA, 25 bp, probe
ttctgaccctacaaacaggtcccta

SEQ ID NO: 296300 - DNA, 25 bp, probe
ttaggccaggccaacacaagtgacc

SEQ ID NO: 296301 - DNA, 25 bp, probe
ttagcctcgggatccagtgaagcca

SEQ ID NO: 296302 - DNA, 25 bp, probe
ttagcctcgggatccagtgaagcca

SEQ ID NO: 296303 - DNA, 25 bp, probe
ttacctgccggctatgtcggaagac

SEQ ID NO: 296304 - DNA, 25 bp, probe
ttactgcccaggcctatctggaagc

SEQ ID NO: 296305 - DNA, 25 bp, probe
ttactgcccaggcctatctggaagc

SEQ ID NO: 296306 - DNA, 25 bp, probe
ttttgcccagtcgttctggaccaaa

SEQ ID NO: 296307 - DNA, 25 bp, probe
ttttcagaaatctttcagaactcaa

SEQ ID NO: 296308 - DNA, 25 bp, probe
ttttcgaagagcatgtgaagttaca

SEQ ID NO: 296309 - DNA, 25 bp, probe
ttgtcctaaagcaattgaagttgta

SEQ ID NO: 296310 - DNA, 25 bp, probe
ttgtttagactgaaggaagacgttt

SEQ ID NO: 296311 - DNA, 25 bp, probe
ttatgttaacctttaagagatttgt

SEQ ID NO: 296312 - DNA, 25 bp, probe
ttatttaacctagttcaatgtgctt

SEQ ID NO: 296313 - DNA, 25 bp, probe
ttatttctacctttctgagtctctt

SEQ ID NO: 296314 - DNA, 25 bp, probe
ttttgtttctctttgcagagagcca

SEQ ID NO: 296315 - DNA, 25 bp, probe
ttttctttgcactttggatgctgaa

SEQ ID NO: 296316 - DNA, 25 bp, probe
ttttctttgcactttggatgctgaa

SEQ ID NO: 296317 - DNA, 25 bp, probe
ttattttctgagacttggattaatt

SEQ ID NO: 296318 - DNA, 25 bp, probe
ttatttctggaaaaggtctcattat

SEQ ID NO: 296319 - DNA, 25 bp, probe
ttattttggcataaaggctttactt

SEQ ID NO: 296320 - DNA, 25 bp, probe
ttattttggcataaaggctttactt

SEQ ID NO: 296321 - DNA, 25 bp, probe
ttattctgctccttaaggttaacaa

SEQ ID NO: 296322 - DNA, 25 bp, probe
ttattcctcccacaggaagaaatgt

SEQ ID NO: 296323 - DNA, 25 bp, probe
ttttgcccggatcattggagagaag

SEQ ID NO: 296324 - DNA, 25 bp, probe
ttttgcacccttaaatgtaagaatg

SEQ ID NO: 296325 - DNA, 25 bp, probe
ttttaactttaccatgctcaatgaa

SEQ ID NO: 296326 - DNA, 25 bp, probe
ttttaacttgcgtgtctgcagtcaa

SEQ ID NO: 296327 - DNA, 25 bp, probe
ttttaacttgcgtgtctgcagtcaa

SEQ ID NO: 296328 - DNA, 25 bp, probe
ttttaacatttatactgagcatcca

SEQ ID NO: 296329 - DNA, 25 bp, probe
ttttgaatatttaagccttgatcct

SEQ ID NO: 296330 - DNA, 25 bp, probe
ttttcattcatcattatcgttgtcc

SEQ ID NO: 296331 - DNA, 25 bp, probe
ttttcagtttatcatcgttgactct

SEQ ID NO: 296332 - DNA, 25 bp, probe
ttttcactttttacatgattactca

SEQ ID NO: 296333 - DNA, 25 bp, probe
ttattctcatttaatataaacctca

SEQ ID NO: 296334 - DNA, 25 bp, probe
ttttctatcttcaaaaccaactaag

SEQ ID NO: 296335 - DNA, 25 bp, probe
ttttctatttattgtaccaaagaca

SEQ ID NO: 296336 - DNA, 25 bp, probe
ttttctatttattgtaccaaagaca

SEQ ID NO: 296337 - DNA, 25 bp, probe
ttttctatttattgtaccaaagaca

SEQ ID NO: 296338 - DNA, 25 bp, probe
ttttcatttacctttccagtatgaa

SEQ ID NO: 296339 - DNA, 25 bp, probe
ttttcactgtacagacactaattca

SEQ ID NO: 296340 - DNA, 25 bp, probe
ttttcactgtacagacactaattca

SEQ ID NO: 296341 - DNA, 25 bp, probe
ttttcactgtgacattatccaagta

SEQ ID NO: 296342 - DNA, 25 bp, probe
ttattcctgtatgttgtccaattgt

SEQ ID NO: 296343 - DNA, 25 bp, probe
ttatccttgttcctgttacaatatt

SEQ ID NO: 296344 - DNA, 25 bp, probe
ttatccttgttcctgttacaatatt

SEQ ID NO: 296345 - DNA, 25 bp, probe
ttatgccaggttctgaaaagatcag

SEQ ID NO: 296346 - DNA, 25 bp, probe
ttagcccacaaactgaataagtcag

SEQ ID NO: 296347 - DNA, 25 bp, probe
ttagcccacaaactgaataagtcag

SEQ ID NO: 296348 - DNA, 25 bp, probe
ttgaccccagcgagatcaaagttgt

SEQ ID NO: 296349 - DNA, 25 bp, probe
ttgtccccgtgttattaatcttcat

SEQ ID NO: 296350 - DNA, 25 bp, probe
ttacccgcaggttttcagatctagg

SEQ ID NO: 296351 - DNA, 25 bp, probe
ttacccagagtttttatgtagcagg

SEQ ID NO: 296352 - DNA, 25 bp, probe
ttacccagagtttttatgtagcagg

SEQ ID NO: 296353 - DNA, 25 bp, probe
ttatctccaggtatcatttatcact

SEQ ID NO: 296354 - DNA, 25 bp, probe
ttttccttcttgacatttatcacct

SEQ ID NO: 296355 - DNA, 25 bp, probe
ttttccctctgtagtttctcaagtg

SEQ ID NO: 296356 - DNA, 25 bp, probe
ttttcccattatacttctcacaatt

SEQ ID NO: 296357 - DNA, 25 bp, probe
ttttctcctagatgcttgtaattct

SEQ ID NO: 296358 - DNA, 25 bp, probe
ttttctcctagatgcttgtaattct

SEQ ID NO: 296359 - DNA, 25 bp, probe
ttttcttctactggcttgtaattta

SEQ ID NO: 296360 - DNA, 25 bp, probe
ttttctgtattcgctgttcaataaa

SEQ ID NO: 296361 - DNA, 25 bp, probe
ttttcatatactggcctttaaatca

SEQ ID NO: 296362 - DNA, 25 bp, probe
ttcttcatacctacccttgttatga

SEQ ID NO: 296363 - DNA, 25 bp, probe
ttttcacatccttgactttttagat

SEQ ID NO: 296364 - DNA, 25 bp, probe
ttttggatccaattctttattactt

SEQ ID NO: 296365 - DNA, 25 bp, probe
ttcatttgacggtctctttttgatc

SEQ ID NO: 296366 - DNA, 25 bp, probe
ttttcatgggagctcttttctgatc

SEQ ID NO: 296367 - DNA, 25 bp, probe
ttattaggggattctatttcatatt

SEQ ID NO: 296368 - DNA, 25 bp, probe
ttttaagatggatttcattgaatat

SEQ ID NO: 296369 - DNA, 25 bp, probe
ttttaatgtcatattcatctggtaa

SEQ ID NO: 296370 - DNA, 25 bp, probe
ttttgaagactcattcagctctgcc

SEQ ID NO: 296371 - DNA, 25 bp, probe
ttttgaagtccaagagcatcccagc

SEQ ID NO: 296372 - DNA, 25 bp, probe
ttttcatcagtttcacagctggcca

SEQ ID NO: 296373 - DNA, 25 bp, probe
ttattctcagatctgccaggtctca

SEQ ID NO: 296374 - DNA, 25 bp, probe
ttatttcatgtgactccagtgccct

SEQ ID NO: 296375 - DNA, 25 bp, probe
ttatttcatgtgactccagtgccct

SEQ ID NO: 296376 - DNA, 25 bp, probe
ttttctctgtccacagtcaatgctg

SEQ ID NO: 296377 - DNA, 25 bp, probe
ttttctgcttccaggtcaggagcag

SEQ ID NO: 296378 - DNA, 25 bp, probe
ttattatctgtctcttgtagtacaa

SEQ ID NO: 296379 - DNA, 25 bp, probe
ttttctcaatgctcttgggtgcaaa

SEQ ID NO: 296380 - DNA, 25 bp, probe
ttttgccaacacctgctggtcagat

SEQ ID NO: 296381 - DNA, 25 bp, probe
ttttgctgcccagttgtggtaggcc

SEQ ID NO: 296382 - DNA, 25 bp, probe
ttatggccttgcttatcggtactgc

SEQ ID NO: 296383 - DNA, 25 bp, probe
ttatgagatccacctaaggccattg

SEQ ID NO: 296384 - DNA, 25 bp, probe
ttatggctacccaaattgcctctgg

SEQ ID NO: 296385 - DNA, 25 bp, probe
ttatggctacccaaattgcctctgg

SEQ ID NO: 296386 - DNA, 25 bp, probe
ttatggctacccaaattgcctctgg

SEQ ID NO: 296387 - DNA, 25 bp, probe
ttatgggacccgacatttttcagct

SEQ ID NO: 296388 - DNA, 25 bp, probe
ttatgggacccgacatttttcagct

SEQ ID NO: 296389 - DNA, 25 bp, probe
ttttggaaccatgcaagtggcgact

SEQ ID NO: 296390 - DNA, 25 bp, probe
ttattgtaccaaagacagtggtggt

SEQ ID NO: 296391 - DNA, 25 bp, probe
ttatttgtcaggtccaaaggtcgta

SEQ ID NO: 296392 - DNA, 25 bp, probe
ttattttcaggctcaacctactgac

SEQ ID NO: 296393 - DNA, 25 bp, probe
ttatttcataggtacatgaagtatt

SEQ ID NO: 296394 - DNA, 25 bp, probe
ttttccttgcaggagcgtcagttgc

SEQ ID NO: 296395 - DNA, 25 bp, probe
ttatggcctggagagcgtgagctat

SEQ ID NO: 296396 - DNA, 25 bp, probe
ttatggcctggagagcgtgagctat

SEQ ID NO: 296397 - DNA, 25 bp, probe
ttaggactgttacagctgagcatta

SEQ ID NO: 296398 - DNA, 25 bp, probe
ttaggatcttgttgaatccagtcca

SEQ ID NO: 296399 - DNA, 25 bp, probe
ttatggttcatgttatatcctcccc

SEQ ID NO: 296400 - DNA, 25 bp, probe
ttatataccagtttatccccattct

SEQ ID NO: 296401 - DNA, 25 bp, probe
ttagattaagttcatccctgcaagg

SEQ ID NO: 296402 - DNA, 25 bp, probe
ttatgtaaggggtttcctgcagaat

SEQ ID NO: 296403 - DNA, 25 bp, probe
ttattaaagtgttttgatccacaaa

SEQ ID NO: 296404 - DNA, 25 bp, probe
ttattaaagtgttttgatccacaaa

SEQ ID NO: 296405 - DNA, 25 bp, probe
ttatttgacagatcgggaaactgaa

SEQ ID NO: 296406 - DNA, 25 bp, probe
ttttctacaatttggtataactaag

SEQ ID NO: 296407 - DNA, 25 bp, probe
ttttcttcttgttcgtgataactag

SEQ ID NO: 296408 - DNA, 25 bp, probe
ttttctgtcttgttaatattgatta

SEQ ID NO: 296409 - DNA, 25 bp, probe
ttttcttcttgccaattttgttgtt

SEQ ID NO: 296410 - DNA, 25 bp, probe
ttttctttcagcctattttgagtta

SEQ ID NO: 296411 - DNA, 25 bp, probe
ttttctgttgcaccttgtagtggat

SEQ ID NO: 296412 - DNA, 25 bp, probe
ttttctgggagagggggggattgat

SEQ ID NO: 296413 - DNA, 25 bp, probe
ttttgtgggtggagggccagagtgt

SEQ ID NO: 296414 - DNA, 25 bp, probe
ttattggggctggatcccccagcct

SEQ ID NO: 296415 - DNA, 25 bp, probe
ttttgtgtggatcatgctctcccag

SEQ ID NO: 296416 - DNA, 25 bp, probe
ttttgtttgctgacgactcctcaga

SEQ ID NO: 296417 - DNA, 25 bp, probe
ttattgtttgtgaacctctgcttcg

SEQ ID NO: 296418 - DNA, 25 bp, probe
ttatagctttgtcccatttcttatc

SEQ ID NO: 296419 - DNA, 25 bp, probe
ttataaacatttactttgtccataa

SEQ ID NO: 296420 - DNA, 25 bp, probe
ttttgcctctaaattttgtcctaag

SEQ ID NO: 296421 - DNA, 25 bp, probe
ttttccgtttgcttttgttccaatg

SEQ ID NO: 296422 - DNA, 25 bp, probe
ttttccagttgtttaatttccattg

SEQ ID NO: 296423 - DNA, 25 bp, probe
ttttcctgtcttttgacatttgact

SEQ ID NO: 296424 - DNA, 25 bp, probe
ttttccatggcatcagtatacctga

SEQ ID NO: 296425 - DNA, 25 bp, probe
ttttcctgtgattatgtatagcctt

SEQ ID NO: 296426 - DNA, 25 bp, probe
ttttctctggaatatattggccttc

SEQ ID NO: 296427 - DNA, 25 bp, probe
ttttctcttaatttcatgtacctgt

SEQ ID NO: 296428 - DNA, 25 bp, probe
ttttctcttctctgttgtaggtttt

SEQ ID NO: 296429 - DNA, 25 bp, probe
ttttctgtgtactgattgctataat

SEQ ID NO: 296430 - DNA, 25 bp, probe
ttttctggaatctcactcttgtttt

SEQ ID NO: 296431 - DNA, 25 bp, probe
ttattgtggaactggcctatgcctt

SEQ ID NO: 296432 - DNA, 25 bp, probe
ttattgtggaactggcctatgcctt

SEQ ID NO: 296433 - DNA, 25 bp, probe
ttatcttgaaactgaccaaacgctt

SEQ ID NO: 296434 - DNA, 25 bp, probe
ttgagtacgaaccggccaagaggtt

SEQ ID NO: 296435 - DNA, 25 bp, probe
ttatgtcctgaagctgacccgaggt

SEQ ID NO: 296436 - DNA, 25 bp, probe
ttatgtcctgacacgtcttcaagca

SEQ ID NO: 296437 - DNA, 25 bp, probe
ttagctgctcgaaactgcatgttgc

SEQ ID NO: 296438 - DNA, 25 bp, probe
ttattctcacatacctgaggcagcc

SEQ ID NO: 296439 - DNA, 25 bp, probe
ttatctattcacttctggtgccaca

SEQ ID NO: 296440 - DNA, 25 bp, probe
ttatcacactcacacagttgactat

SEQ ID NO: 296441 - DNA, 25 bp, probe
ttatcacactcacacagttgactat

SEQ ID NO: 296442 - DNA, 25 bp, probe
ttatcaaaggcatcgttgtctgcta

SEQ ID NO: 296443 - DNA, 25 bp, probe
ttatcaggtgccaagccctgttctc

SEQ ID NO: 296444 - DNA, 25 bp, probe
ttacggtcatctggacgttctgcac

SEQ ID NO: 296445 - DNA, 25 bp, probe
ttacggtcatctggacgttctgcac

SEQ ID NO: 296446 - DNA, 25 bp, probe
ttacaaggctgcggacttccagctg

SEQ ID NO: 296447 - DNA, 25 bp, probe
ttcaatctggtgccggcttaaaggg

SEQ ID NO: 296448 - DNA, 25 bp, probe
ttagatctgggcaccaataaaggcg

SEQ ID NO: 296449 - DNA, 25 bp, probe
ttatccatggaaccaaatcaagagg

SEQ ID NO: 296450 - DNA, 25 bp, probe
ttatcagagagttgcaaaaaaagac

SEQ ID NO: 296451 - DNA, 25 bp, probe
ttatcgaagtgtgtatcaaaagaga

SEQ ID NO: 296452 - DNA, 25 bp, probe
ttattggaattgcttatgaaggaaa

SEQ ID NO: 296453 - DNA, 25 bp, probe
ttatttatgattctggggggaaaat

SEQ ID NO: 296454 - DNA, 25 bp, probe
ttttgttgtgttagggatgtggtga

SEQ ID NO: 296455 - DNA, 25 bp, probe
ttttgtatatggtgtgaggtgggag

SEQ ID NO: 296456 - DNA, 25 bp, probe
ttttgtatatggtgtgaggtgggag

SEQ ID NO: 296457 - DNA, 25 bp, probe
ttttgctacatggggtctgggtggg

SEQ ID NO: 296458 - DNA, 25 bp, probe
ttttgcatgactgtggcctgttgct

SEQ ID NO: 296459 - DNA, 25 bp, probe
ttttctgatcttaagcccagctctg

SEQ ID NO: 296460 - DNA, 25 bp, probe
ttttccctgttatctcacactgaat

SEQ ID NO: 296461 - DNA, 25 bp, probe
ttatccaactgttatactaccagaa

SEQ ID NO: 296462 - DNA, 25 bp, probe
ttatgccaagctgataactactgac

SEQ ID NO: 296463 - DNA, 25 bp, probe
ttagcgggtggatttccctgaccca

SEQ ID NO: 296464 - DNA, 25 bp, probe
ttagcgggtggatttccctgaccca

SEQ ID NO: 296465 - DNA, 25 bp, probe
ttatccggtggctttagccgtgcaa

SEQ ID NO: 296466 - DNA, 25 bp, probe
ttataccagtgactttgagcctgtc

SEQ ID NO: 296467 - DNA, 25 bp, probe
ttattccaaacgtctatgctgcttt

SEQ ID NO: 296468 - DNA, 25 bp, probe
ttattccagcattcgatgcattttt

SEQ ID NO: 296469 - DNA, 25 bp, probe
ttatgtctccatctgcagtaatgtt

SEQ ID NO: 296470 - DNA, 25 bp, probe
ttattctcattcttaggtgcatttt

SEQ ID NO: 296471 - DNA, 25 bp, probe
ttttccactctatggatgatcactt

SEQ ID NO: 296472 - DNA, 25 bp, probe
ttttccactctatggatgatcactt

SEQ ID NO: 296473 - DNA, 25 bp, probe
ttttgtcactctagaagagttcttc

SEQ ID NO: 296474 - DNA, 25 bp, probe
ttttgtcacggaaagcatcctctcc

SEQ ID NO: 296475 - DNA, 25 bp, probe
ttttctgcagctgtaggcatacccc

SEQ ID NO: 296476 - DNA, 25 bp, probe
ttttgtctcagcatcagtatatccc

SEQ ID NO: 296477 - DNA, 25 bp, probe
ttattttattacctttcactctctg

SEQ ID NO: 296478 - DNA, 25 bp, probe
ttattctctgatgcactgtttgccc

SEQ ID NO: 296479 - DNA, 25 bp, probe
ttattgctatatagattgttcctcc

SEQ ID NO: 296480 - DNA, 25 bp, probe
ttatttcataagagttactttgcaa

SEQ ID NO: 296481 - DNA, 25 bp, probe
ttttgtctaagttctcattctttca

SEQ ID NO: 296482 - DNA, 25 bp, probe
ttttctgataaattctttctttgag

SEQ ID NO: 296483 - DNA, 25 bp, probe
ttttctagacaattctctattttac

SEQ ID NO: 296484 - DNA, 25 bp, probe
ttttccaattcatttatattttaca

SEQ ID NO: 296485 - DNA, 25 bp, probe
ttttccagtctattttctgtcttgt

SEQ ID NO: 296486 - DNA, 25 bp, probe
ttttccttctaaactcttcatgtgg

SEQ ID NO: 296487 - DNA, 25 bp, probe
ttttcttactaggtcatgttcacgg

SEQ ID NO: 296488 - DNA, 25 bp, probe
ttttgatcccaaggcatatttctcc

SEQ ID NO: 296489 - DNA, 25 bp, probe
ttttctgcctaagtgctacgtgatc

SEQ ID NO: 296490 - DNA, 25 bp, probe
ttttgctactaagttcacattagaa

SEQ ID NO: 296491 - DNA, 25 bp, probe
ttttgctactcttgtcagacaatgg

SEQ ID NO: 296492 - DNA, 25 bp, probe
ttatgtggatcctgtcaacaaagtt

SEQ ID NO: 296493 - DNA, 25 bp, probe
ttattgagcatctcttctccataag

SEQ ID NO: 296494 - DNA, 25 bp, probe
ttatgtgaatgatctctctgaatcc

SEQ ID NO: 296495 - DNA, 25 bp, probe
ttgcagatgaagttcccaaccgacc

SEQ ID NO: 296496 - DNA, 25 bp, probe
ttcagtgagaattccctcgtcgact

SEQ ID NO: 296497 - DNA, 25 bp, probe
ttagtggaagacatcctatctagct

SEQ ID NO: 296498 - DNA, 25 bp, probe
ttattgttatacacagctttatgat

SEQ ID NO: 296499 - DNA, 25 bp, probe
ttattgtgataagtacattgtttcc

SEQ ID NO: 296500 - DNA, 25 bp, probe
ttattatgttgccttcttgtttctc

SEQ ID NO: 296501 - DNA, 25 bp, probe
ttttctgtgttgttcatagtcaatc

SEQ ID NO: 296502 - DNA, 25 bp, probe
ttttctggcttgtcattctgtacac

SEQ ID NO: 296503 - DNA, 25 bp, probe
ttttctgtcttttgctagcttcacc

SEQ ID NO: 296504 - DNA, 25 bp, probe
ttttctacttctggtcatgcttaca

SEQ ID NO: 296505 - DNA, 25 bp, probe
ttttgtgcctgtgcagattgcaata

SEQ ID NO: 296506 - DNA, 25 bp, probe
ttttctctcttggagcatgcatgga

SEQ ID NO: 296507 - DNA, 25 bp, probe
ttttctcttttagctatgaaccagg

SEQ ID NO: 296508 - DNA, 25 bp, probe
ttttctcttttagctatgaaccagg

SEQ ID NO: 296509 - DNA, 25 bp, probe
ttttctcagttctacttatgacacc

SEQ ID NO: 296510 - DNA, 25 bp, probe
ttttctggcttctaccatgaaatcc

SEQ ID NO: 296511 - DNA, 25 bp, probe
ttttctgagcatacctggaaaatgc

SEQ ID NO: 296512 - DNA, 25 bp, probe
ttatattagcatacaaggacaattg

SEQ ID NO: 296513 - DNA, 25 bp, probe
ttatattgtctcaacatggtccatg

SEQ ID NO: 296514 - DNA, 25 bp, probe
ttttgtgtgcaaacttgtccggagg

SEQ ID NO: 296515 - DNA, 25 bp, probe
ttttgtatgccaacctagataggat

SEQ ID NO: 296516 - DNA, 25 bp, probe
ttatcttatgccacgggaagtttag

SEQ ID NO: 296517 - DNA, 25 bp, probe
ttttgcttgcgtgctgggacagcta

SEQ ID NO: 296518 - DNA, 25 bp, probe
ttagtcgatcgagatgaggaagtaa

SEQ ID NO: 296519 - DNA, 25 bp, probe
ttgaccaatggctaagtgaagatga

SEQ ID NO: 296520 - DNA, 25 bp, probe
ttaccaatggtctctataatttccc

SEQ ID NO: 296521 - DNA, 25 bp, probe
ttaccaatggtctctataatttccc

SEQ ID NO: 296522 - DNA, 25 bp, probe
ttaacatccgactctgtagtgtccc

SEQ ID NO: 296523 - DNA, 25 bp, probe
ttaaagccttgctctgttgtgtcct

SEQ ID NO: 296524 - DNA, 25 bp, probe
ttatgccctttggactgtcaggtcc

SEQ ID NO: 296525 - DNA, 25 bp, probe
ttcatccctgtagtaccgggctcga

SEQ ID NO: 296526 - DNA, 25 bp, probe
ttcactggttatgcggcggatccga

SEQ ID NO: 296527 - DNA, 25 bp, probe
ttcacggcttcttctggggtaaaga

SEQ ID NO: 296528 - DNA, 25 bp, probe
ttacgggtttggttttgatatgaat

SEQ ID NO: 296529 - DNA, 25 bp, probe
ttagggtgggtatttttctgaagat

SEQ ID NO: 296530 - DNA, 25 bp, probe
ttagagtaggtgaatttgtttcaaa

SEQ ID NO: 296531 - DNA, 25 bp, probe
ttgacaggggctatgggtttgcttt

SEQ ID NO: 296532 - DNA, 25 bp, probe
ttacttgggcaagggtgctttcctt

SEQ ID NO: 296533 - DNA, 25 bp, probe
ttttgaggcgaaggcgtctgtctct

SEQ ID NO: 296534 - DNA, 25 bp, probe
ttatggggatcatgtgcgtgctgtc

SEQ ID NO: 296535 - DNA, 25 bp, probe
ttatgcagggatggatatggggacc

SEQ ID NO: 296536 - DNA, 25 bp, probe
ttatgcagggatggatatggggacc

SEQ ID NO: 296537 - DNA, 25 bp, probe
ttatgagagaatgttggtatgccaa

SEQ ID NO: 296538 - DNA, 25 bp, probe
ttatgagagaatgttggtatgccaa

SEQ ID NO: 296539 - DNA, 25 bp, probe
ttatctgatattgttggattcacaa

SEQ ID NO: 296540 - DNA, 25 bp, probe
ttactgtcaatgtctatagattaga

SEQ ID NO: 296541 - DNA, 25 bp, probe
ttagttcatatgctcttacttgggc

SEQ ID NO: 296542 - DNA, 25 bp, probe
ttattgttcagccttatcccttggc

SEQ ID NO: 296543 - DNA, 25 bp, probe
ttttctctagcatattcccttggga

SEQ ID NO: 296544 - DNA, 25 bp, probe
ttttctccacaaaggccctggtggt

SEQ ID NO: 296545 - DNA, 25 bp, probe
ttttctcccatttggatcctttgag

SEQ ID NO: 296546 - DNA, 25 bp, probe
ttttccagccgttgaccaattatag

SEQ ID NO: 296547 - DNA, 25 bp, probe
ttctctaagaccattcgcgatttag

SEQ ID NO: 296548 - DNA, 25 bp, probe
ttcttaattccatttcctgaggtaa

SEQ ID NO: 296549 - DNA, 25 bp, probe
ttcagtctacccactctcagggtaa

SEQ ID NO: 296550 - DNA, 25 bp, probe
ttaacatccccagatgtcggcggca

SEQ ID NO: 296551 - DNA, 25 bp, probe
ttcagaaccacgcccgtaaggtgca

SEQ ID NO: 296552 - DNA, 25 bp, probe
ttcagaaccacgcccgtaaggtgca

SEQ ID NO: 296553 - DNA, 25 bp, probe
ttcgaacctcggtcgcaggagttgc

SEQ ID NO: 296554 - DNA, 25 bp, probe
ttgtgaggccggaatccgggctccc

SEQ ID NO: 296555 - DNA, 25 bp, probe
ttatgggtcagagttccgactgcca

SEQ ID NO: 296556 - DNA, 25 bp, probe
ttagggtaattcctccagtgacctg

SEQ ID NO: 296557 - DNA, 25 bp, probe
ttagggtaattcctccagtgacctg

SEQ ID NO: 296558 - DNA, 25 bp, probe
ttagggtaattcctccagtgacctg

SEQ ID NO: 296559 - DNA, 25 bp, probe
ttagggtaattcctccagtgacctg

SEQ ID NO: 296560 - DNA, 25 bp, probe
ttatggcagtaaaatgtctaggact

SEQ ID NO: 296561 - DNA, 25 bp, probe
ttagtgagaagaagatgtccacccc

SEQ ID NO: 296562 - DNA, 25 bp, probe
ttaggaataacactgcagccctctc

SEQ ID NO: 296563 - DNA, 25 bp, probe
ttatgtgattcctggagcctgtgcc

SEQ ID NO: 296564 - DNA, 25 bp, probe
ttatggatcccttgggctgtgggcc

SEQ ID NO: 296565 - DNA, 25 bp, probe
ttatggatcccttgggctgtgggcc

SEQ ID NO: 296566 - DNA, 25 bp, probe
ttatcgacatctttgaagctggggc

SEQ ID NO: 296567 - DNA, 25 bp, probe
ttaggaactatttggttgggcaggc

SEQ ID NO: 296568 - DNA, 25 bp, probe
ttaaaatcttaattgttggctgggc

SEQ ID NO: 296569 - DNA, 25 bp, probe
ttaaaatcttaattgttggctgggc

SEQ ID NO: 296570 - DNA, 25 bp, probe
ttaaagggctaatgtatggtggtgt

SEQ ID NO: 296571 - DNA, 25 bp, probe
ttactaaggtaagggattgaggatc

SEQ ID NO: 296572 - DNA, 25 bp, probe
ttactacacagtttggttacaggac

SEQ ID NO: 296573 - DNA, 25 bp, probe
ttatctacagcatacggaacaagga

SEQ ID NO: 296574 - DNA, 25 bp, probe
ttgatgctgacaagtccggcaccat

SEQ ID NO: 296575 - DNA, 25 bp, probe
ttgatgctgacaagtccggcaccat

SEQ ID NO: 296576 - DNA, 25 bp, probe
ttattcacatggagctggatcatga

SEQ ID NO: 296577 - DNA, 25 bp, probe
ttatcccagtgacgcatctgtgcag

SEQ ID NO: 296578 - DNA, 25 bp, probe
ttatcccagtgacgcatctgtgcag

SEQ ID NO: 296579 - DNA, 25 bp, probe
ttatccacggcactccgcgagctgt

SEQ ID NO: 296580 - DNA, 25 bp, probe
ttaccaaggaataactggcgggcac

SEQ ID NO: 296581 - DNA, 25 bp, probe
ttatcaactctgtaaactctcggga

SEQ ID NO: 296582 - DNA, 25 bp, probe
ttatcaactctgtaaactctcggga

SEQ ID NO: 296583 - DNA, 25 bp, probe
ttatcaacaaggagggccatgtgaa

SEQ ID NO: 296584 - DNA, 25 bp, probe
ttatcagtgcaagaggaggccttag

SEQ ID NO: 296585 - DNA, 25 bp, probe
ttatgcgtgcgagaagtcagtggta

SEQ ID NO: 296586 - DNA, 25 bp, probe
ttatggtctgaaccggcagatgtgt

SEQ ID NO: 296587 - DNA, 25 bp, probe
ttacgtcagtcgtgtgcagctctga

SEQ ID NO: 296588 - DNA, 25 bp, probe
ttacgtcagtcgtgtgcagctctga

SEQ ID NO: 296589 - DNA, 25 bp, probe
ttatttcactcaggggcactgtggt

SEQ ID NO: 296590 - DNA, 25 bp, probe
ttttccacgcagactgtagctgctg

SEQ ID NO: 296591 - DNA, 25 bp, probe
ttttccgcgatgatgtcacctagca

SEQ ID NO: 296592 - DNA, 25 bp, probe
ttttccagagttagatcctctcaga

SEQ ID NO: 296593 - DNA, 25 bp, probe
ttttctgctatcaagtcatccttta

SEQ ID NO: 296594 - DNA, 25 bp, probe
ttttgctttcacaatttgtcttaca

SEQ ID NO: 296595 - DNA, 25 bp, probe
ttatatctgttgcctagttttgtac

SEQ ID NO: 296596 - DNA, 25 bp, probe
ttatatctgttgcctagttttgtac

SEQ ID NO: 296597 - DNA, 25 bp, probe
ttattcttgctgttggtggggtaac

SEQ ID NO: 296598 - DNA, 25 bp, probe
ttatgttttttgatggtgttgacca

SEQ ID NO: 296599 - DNA, 25 bp, probe
ttatttaattgtccggtttgtcttg

SEQ ID NO: 296600 - DNA, 25 bp, probe
ttacttttgttggccttattttatg

SEQ ID NO: 296601 - DNA, 25 bp, probe
ttacttttgttggccttattttatg

SEQ ID NO: 296602 - DNA, 25 bp, probe
ttttgttggctggacactgtttttt

SEQ ID NO: 296603 - DNA, 25 bp, probe
ttttgttttgtagcctgcttttgct

SEQ ID NO: 296604 - DNA, 25 bp, probe
ttttgagtatatcaatcctcttttg

SEQ ID NO: 296605 - DNA, 25 bp, probe
ttttgtgtataatgtgctttatttg

SEQ ID NO: 296606 - DNA, 25 bp, probe
ttttgtcttctgagtgttggagctt

SEQ ID NO: 296607 - DNA, 25 bp, probe
ttttgattcttgattttcaagcttt

SEQ ID NO: 296608 - DNA, 25 bp, probe
ttagtttttatgcctgttaagcttt

SEQ ID NO: 296609 - DNA, 25 bp, probe
ttagatgttttccttgggatttatt

SEQ ID NO: 296610 - DNA, 25 bp, probe
ttttgtcattggcttaggatttaac

SEQ ID NO: 296611 - DNA, 25 bp, probe
ttatgataaaggcttaggacttcaa

SEQ ID NO: 296612 - DNA, 25 bp, probe
ttataagtagatctttttcattgca

SEQ ID NO: 296613 - DNA, 25 bp, probe
ttaggttacatcatttttcttgctg

SEQ ID NO: 296614 - DNA, 25 bp, probe
ttaggttgaaacatatctcttatct

SEQ ID NO: 296615 - DNA, 25 bp, probe
ttacacatctgataaatattaaatc

SEQ ID NO: 296616 - DNA, 25 bp, probe
ttacccgtaatatttgtcaagatca

SEQ ID NO: 296617 - DNA, 25 bp, probe
ttacccagagaactttccaaacaag

SEQ ID NO: 296618 - DNA, 25 bp, probe
ttacttcaatgggctcttccaacaa

SEQ ID NO: 296619 - DNA, 25 bp, probe
ttacccagagggacttctcgtcaat

SEQ ID NO: 296620 - DNA, 25 bp, probe
ttacctaatggtctctacctaatgg

SEQ ID NO: 296621 - DNA, 25 bp, probe
ttaacaatatgggtattacctttgt

SEQ ID NO: 296622 - DNA, 25 bp, probe
ttaagttagagagtagtccctcttg

SEQ ID NO: 296623 - DNA, 25 bp, probe
ttatgatgttaacaactcagccatc

SEQ ID NO: 296624 - DNA, 25 bp, probe
ttatgatgcgtttgagagcaagagc

SEQ ID NO: 296625 - DNA, 25 bp, probe
ttatgatgcgtttgagagcaagagc

SEQ ID NO: 296626 - DNA, 25 bp, probe
ttatgcatgcccacaggaaagcaga

SEQ ID NO: 296627 - DNA, 25 bp, probe
ttatgcatgcccacaggaaagcaga

SEQ ID NO: 296628 - DNA, 25 bp, probe
ttattagccttccagccactgagaa

SEQ ID NO: 296629 - DNA, 25 bp, probe
ttattagccttccagccactgagaa

SEQ ID NO: 296630 - DNA, 25 bp, probe
ttatgtacttgttctacctggattg

SEQ ID NO: 296631 - DNA, 25 bp, probe
ttagcttttcttctactggcttgta

SEQ ID NO: 296632 - DNA, 25 bp, probe
ttagctgcttctatgtttcatagtt

SEQ ID NO: 296633 - DNA, 25 bp, probe
ttaggtcattactaaccatagttat

SEQ ID NO: 296634 - DNA, 25 bp, probe
ttattgcaatttaacaccagagttt

SEQ ID NO: 296635 - DNA, 25 bp, probe
ttattgagcttcatcatgaccagaa

SEQ ID NO: 296636 - DNA, 25 bp, probe
ttatcatcgttgactctttgcaaag

SEQ ID NO: 296637 - DNA, 25 bp, probe
ttatgacgacggcctctcagaggag

SEQ ID NO: 296638 - DNA, 25 bp, probe
ttatacctgcgtggcaccatggcag

SEQ ID NO: 296639 - DNA, 25 bp, probe
ttatacaatgcggccatcagcttgg

SEQ ID NO: 296640 - DNA, 25 bp, probe
ttactctgaagggcatcatgcatct

SEQ ID NO: 296641 - DNA, 25 bp, probe
ttatgtctgatgtgaccctgccaaa

SEQ ID NO: 296642 - DNA, 25 bp, probe
ttatgtcagtagtcaccttgctcac

SEQ ID NO: 296643 - DNA, 25 bp, probe
ttatatttaggaacatatgctcatt

SEQ ID NO: 296644 - DNA, 25 bp, probe
ttttcccatggaacatagccacatc

SEQ ID NO: 296645 - DNA, 25 bp, probe
ttttcccatggaacatagccacatc

SEQ ID NO: 296646 - DNA, 25 bp, probe
ttttcccaggaagataacacgacga

SEQ ID NO: 296647 - DNA, 25 bp, probe
ttttcctcaggcaagtataaaagcc

SEQ ID NO: 296648 - DNA, 25 bp, probe
ttttcctcatacaagtaaacacaga

SEQ ID NO: 296649 - DNA, 25 bp, probe
ttatggcacctgacttgtaaaaaaa

SEQ ID NO: 296650 - DNA, 25 bp, probe
ttaccaacttgcatttaacaaacaa

SEQ ID NO: 296651 - DNA, 25 bp, probe
ttcacgtaggctcctgttaaaaaca

SEQ ID NO: 296652 - DNA, 25 bp, probe
ttcacgtaggctcctgttaaaaaca

SEQ ID NO: 296653 - DNA, 25 bp, probe
ttagagttggcttctcgggaaacca

SEQ ID NO: 296654 - DNA, 25 bp, probe
ttgtcgttgccttcacagtggacaa

SEQ ID NO: 296655 - DNA, 25 bp, probe
ttagtgttgcactgactgatgggaa

SEQ ID NO: 296656 - DNA, 25 bp, probe
ttatcaatgtcatttggctatagaa

SEQ ID NO: 296657 - DNA, 25 bp, probe
ttatcgagccaaatggatatcacag

SEQ ID NO: 296658 - DNA, 25 bp, probe
ttatacagccaggtgggaagcagct

SEQ ID NO: 296659 - DNA, 25 bp, probe
ttattgaacagcttggaacaccatg

SEQ ID NO: 296660 - DNA, 25 bp, probe
ttataaactgtctgcagacacctgt

SEQ ID NO: 296661 - DNA, 25 bp, probe
ttaaaccagtcccagacacctagac

SEQ ID NO: 296662 - DNA, 25 bp, probe
ttaccactagttgagtgacctggac

SEQ ID NO: 296663 - DNA, 25 bp, probe
ttacagccttggggatggacttgcc

SEQ ID NO: 296664 - DNA, 25 bp, probe
ttacagtttacgcaggacattcttg

SEQ ID NO: 296665 - DNA, 25 bp, probe
ttagagttatccctgcaggagtcct

SEQ ID NO: 296666 - DNA, 25 bp, probe
ttaggtatttgcatgcgctgcagat

SEQ ID NO: 296667 - DNA, 25 bp, probe
ttagggatttgcttgggatacagaa

SEQ ID NO: 296668 - DNA, 25 bp, probe
ttagggatttgcttgggatacagaa

SEQ ID NO: 296669 - DNA, 25 bp, probe
ttagggcttcgctttgacggcgaca

SEQ ID NO: 296670 - DNA, 25 bp, probe
ttgagtggcacttgctttgggtcca

SEQ ID NO: 296671 - DNA, 25 bp, probe
ttactcgccattgattggtgcccac

SEQ ID NO: 296672 - DNA, 25 bp, probe
ttagccggcagtgcgtggtggacaa

SEQ ID NO: 296673 - DNA, 25 bp, probe
ttatggggctgaacggggagaaaag

SEQ ID NO: 296674 - DNA, 25 bp, probe
ttaggtcagcccaggggagaaagat

SEQ ID NO: 296675 - DNA, 25 bp, probe
ttagaggagcccacggctaagaggc

SEQ ID NO: 296676 - DNA, 25 bp, probe
ttaaggacaccatagctgccaacag

SEQ ID NO: 296677 - DNA, 25 bp, probe
ttaatggaggcaccaaggcaaagca

SEQ ID NO: 296678 - DNA, 25 bp, probe
ttatggctgtggcaaaggcaaaaga

SEQ ID NO: 296679 - DNA, 25 bp, probe
ttagtgggactattacacacaaaac

SEQ ID NO: 296680 - DNA, 25 bp, probe
ttattgaggtgtaattgcacaagta

SEQ ID NO: 296681 - DNA, 25 bp, probe
ttttgtggtgattctcctcatagtt

SEQ ID NO: 296682 - DNA, 25 bp, probe
ttttgggatgattgctcgattgttt

SEQ ID NO: 296683 - DNA, 25 bp, probe
ttattacagatatgctccactgttt

SEQ ID NO: 296684 - DNA, 25 bp, probe
ttatgtagagagggcgccacactgg

SEQ ID NO: 296685 - DNA, 25 bp, probe
ttaggataaggggtcatcaatgctg

SEQ ID NO: 296686 - DNA, 25 bp, probe
ttaccataagggactgtgccagatg

SEQ ID NO: 296687 - DNA, 25 bp, probe
ttatgtgtacgacctcattgccgtg

SEQ ID NO: 296688 - DNA, 25 bp, probe
ttatattggcaacctattctcacta

SEQ ID NO: 296689 - DNA, 25 bp, probe
ttattagcagaagcaaatgtcatgc

SEQ ID NO: 296690 - DNA, 25 bp, probe
ttatctagcaaatgaaatcctgtgg

SEQ ID NO: 296691 - DNA, 25 bp, probe
ttattggagacatatagctcagatg

SEQ ID NO: 296692 - DNA, 25 bp, probe
ttatcctggacatgaatgtattgta

SEQ ID NO: 296693 - DNA, 25 bp, probe
ttatcctgagactgtttatagctta

SEQ ID NO: 296694 - DNA, 25 bp, probe
ttatgcccagccactctgatatact

SEQ ID NO: 296695 - DNA, 25 bp, probe
ttaccagcagaactctctaaaggat

SEQ ID NO: 296696 - DNA, 25 bp, probe
ttaccagaccacttctcagaaaatg

SEQ ID NO: 296697 - DNA, 25 bp, probe
ttatctcgaccttacataggaggag

SEQ ID NO: 296698 - DNA, 25 bp, probe
ttatctcgaccttacataggaggag

SEQ ID NO: 296699 - DNA, 25 bp, probe
ttacttatactatgccagagaggaa

SEQ ID NO: 296700 - DNA, 25 bp, probe
ttacttatcttatgccacgggaagt

SEQ ID NO: 296701 - DNA, 25 bp, probe
ttatctatgtctttatgaaccggca

SEQ ID NO: 296702 - DNA, 25 bp, probe
ttatctatgtctttatgaaccggca

SEQ ID NO: 296703 - DNA, 25 bp, probe
ttatctgtctcttgtagtacaatgt

SEQ ID NO: 296704 - DNA, 25 bp, probe
ttattgcctctgtcttaaagaattt

SEQ ID NO: 296705 - DNA, 25 bp, probe
ttatgtcttctgttttcaggttctg

SEQ ID NO: 296706 - DNA, 25 bp, probe
ttatacttctgacctttgggctttc

SEQ ID NO: 296707 - DNA, 25 bp, probe
ttatacattctcgactttggggatt

SEQ ID NO: 296708 - DNA, 25 bp, probe
ttcaacttcatcaaggtgttgggca

SEQ ID NO: 296709 - DNA, 25 bp, probe
ttaccttactaacttctccgcaagt

SEQ ID NO: 296710 - DNA, 25 bp, probe
ttaccgtatttccaacacacgatag

SEQ ID NO: 296711 - DNA, 25 bp, probe
ttaccgtatttccaacacacgatag

SEQ ID NO: 296712 - DNA, 25 bp, probe
ttaccgtatttccaacacacgatag

SEQ ID NO: 296713 - DNA, 25 bp, probe
ttaccgtatttccaacacacgatag

SEQ ID NO: 296714 - DNA, 25 bp, probe
ttatccggaatcccggcagcctgaa

SEQ ID NO: 296715 - DNA, 25 bp, probe
ttttgcgagaattgaagcaccctaa

SEQ ID NO: 296716 - DNA, 25 bp, probe
ttttgcgagaattgaagcaccctaa

SEQ ID NO: 296717 - DNA, 25 bp, probe
ttttgcaaatataaacatctcctat

SEQ ID NO: 296718 - DNA, 25 bp, probe
ttttgcaaatataaacatctcctat

SEQ ID NO: 296719 - DNA, 25 bp, probe
ttattgctggaattaacttcacata

SEQ ID NO: 296720 - DNA, 25 bp, probe
ttattgctggaattaacttcacata

SEQ ID NO: 296721 - DNA, 25 bp, probe
ttattctgctaatatacctagattt

SEQ ID NO: 296722 - DNA, 25 bp, probe
ttatttcttatatgactctagtgtt

SEQ ID NO: 296723 - DNA, 25 bp, probe
ttattacttaattgttcatgttttc

SEQ ID NO: 296724 - DNA, 25 bp, probe
ttagtacactcatagttagctttgt

SEQ ID NO: 296725 - DNA, 25 bp, probe
ttagtgtcaaatttttagctgtatt

SEQ ID NO: 296726 - DNA, 25 bp, probe
ttatgtgcaaaatctgttatagctt

SEQ ID NO: 296727 - DNA, 25 bp, probe
ttatgtgcaaaatctgttatagctt

SEQ ID NO: 296728 - DNA, 25 bp, probe
ttagctgtcaaacctcctaacttca

SEQ ID NO: 296729 - DNA, 25 bp, probe
ttagcttctaggatccaagtttcct

SEQ ID NO: 296730 - DNA, 25 bp, probe
ttacctccagggatcagctgtgtgt

SEQ ID NO: 296731 - DNA, 25 bp, probe
ttacccaaggtcacatggtttcaga

SEQ ID NO: 296732 - DNA, 25 bp, probe
ttacccaaggtcacaaggccgaaca

SEQ ID NO: 296733 - DNA, 25 bp, probe
ttaccaaaagagtatcaaggccaga

SEQ ID NO: 296734 - DNA, 25 bp, probe
ttatctccaaagcagcataagctgc

SEQ ID NO: 296735 - DNA, 25 bp, probe
ttattccactggcgcatcatatgca

SEQ ID NO: 296736 - DNA, 25 bp, probe
ttcaatgcccggcgtaagcttaagg

SEQ ID NO: 296737 - DNA, 25 bp, probe
ttaggtcctggtctacatgctcaaa

SEQ ID NO: 296738 - DNA, 25 bp, probe
ttagagcagcctcaagtacttcagg

SEQ ID NO: 296739 - DNA, 25 bp, probe
ttaagagcgtgtgaaccttttgtgt

SEQ ID NO: 296740 - DNA, 25 bp, probe
ttaaggcctggaaacgattttctgt

SEQ ID NO: 296741 - DNA, 25 bp, probe
ttaacctataaaactatgtctactg

SEQ ID NO: 296742 - DNA, 25 bp, probe
ttagcagtcttttctagtttccctg

SEQ ID NO: 296743 - DNA, 25 bp, probe
ttaggatcctagttcagtttctggg

SEQ ID NO: 296744 - DNA, 25 bp, probe
ttatggaactctttagaattggtgg

SEQ ID NO: 296745 - DNA, 25 bp, probe
ttaggcagcagcttgaagagtttgg

SEQ ID NO: 296746 - DNA, 25 bp, probe
ttgaggggcacaccaagtctggggt

SEQ ID NO: 296747 - DNA, 25 bp, probe
ttagcgaggccgtgcagggccaggt

SEQ ID NO: 296748 - DNA, 25 bp, probe
ttagcgaggccgtgcagggccaggt

SEQ ID NO: 296749 - DNA, 25 bp, probe
ttagcgaggccgtgcagggccaggt

SEQ ID NO: 296750 - DNA, 25 bp, probe
ttagcgaggtgttcgagtggctccc

SEQ ID NO: 296751 - DNA, 25 bp, probe
ttagcgaggtgttcgagtggctccc

SEQ ID NO: 296752 - DNA, 25 bp, probe
ttagaggcggctccaagagccccca

SEQ ID NO: 296753 - DNA, 25 bp, probe
ttcagatttggcctaaactgccccc

SEQ ID NO: 296754 - DNA, 25 bp, probe
ttaattttcttgttacacccactgc

SEQ ID NO: 296755 - DNA, 25 bp, probe
ttaattttcttgttacacccactgc

SEQ ID NO: 296756 - DNA, 25 bp, probe
ttatttcttctacaacatcaccctg

SEQ ID NO: 296757 - DNA, 25 bp, probe
ttatttctgcaaacaaacacctcct

SEQ ID NO: 296758 - DNA, 25 bp, probe
ttattcattgctttaaagacctctt

SEQ ID NO: 296759 - DNA, 25 bp, probe
ttttgattattaaatagtcactagt

SEQ ID NO: 296760 - DNA, 25 bp, probe
ttttgtttggattttggcatcttgt

SEQ ID NO: 296761 - DNA, 25 bp, probe
ttttgtatggctttttggttatgta

SEQ ID NO: 296762 - DNA, 25 bp, probe
ttatcttggtcttttggattttgaa

SEQ ID NO: 296763 - DNA, 25 bp, probe
ttatcttggtcttttggattttgaa

SEQ ID NO: 296764 - DNA, 25 bp, probe
ttacatgtgggtttctatagtttta

SEQ ID NO: 296765 - DNA, 25 bp, probe
ttatctggaggtctcatttcttgta

SEQ ID NO: 296766 - DNA, 25 bp, probe
ttatctggaagttcagtcttttaaa

SEQ ID NO: 296767 - DNA, 25 bp, probe
ttaagtatagcttcctcccttgaaa

SEQ ID NO: 296768 - DNA, 25 bp, probe
ttaacagggtatgctgcctctgtaa

SEQ ID NO: 296769 - DNA, 25 bp, probe
ttaaagaggattttgtgcctgtgca

SEQ ID NO: 296770 - DNA, 25 bp, probe
ttaccaggggtttggccattgcttg

SEQ ID NO: 296771 - DNA, 25 bp, probe
ttgggtcggttcaagcccaagcttg

SEQ ID NO: 296772 - DNA, 25 bp, probe
ttggggtgggtcagagccgagttaa

SEQ ID NO: 296773 - DNA, 25 bp, probe
ttgagggtagggaggcgggcccagt

SEQ ID NO: 296774 - DNA, 25 bp, probe
ttgtgggggtgattctgggggtcca

SEQ ID NO: 296775 - DNA, 25 bp, probe
ttggggaggtgtacaaggggatcga

SEQ ID NO: 296776 - DNA, 25 bp, probe
ttcaaggtgcgctccaaggaggacg

SEQ ID NO: 296777 - DNA, 25 bp, probe
ttacaagtggcacttcaatgagacg

SEQ ID NO: 296778 - DNA, 25 bp, probe
ttatcaactgctgcttcaccagact

SEQ ID NO: 296779 - DNA, 25 bp, probe
ttataagcttgttggcctagactgc

SEQ ID NO: 296780 - DNA, 25 bp, probe
ttactggctttgtgcctgtagctca

SEQ ID NO: 296781 - DNA, 25 bp, probe
ttttggctataaccagtctcagcaa

SEQ ID NO: 296782 - DNA, 25 bp, probe
ttttggattaaccggctgcagaggg

SEQ ID NO: 296783 - DNA, 25 bp, probe
ttcctgcgaatgaagaggcccgggg

SEQ ID NO: 296784 - DNA, 25 bp, probe
ttcggacaagtacggccttgggtat

SEQ ID NO: 296785 - DNA, 25 bp, probe
ttgtgaacaaggcccccttggagaa

SEQ ID NO: 296786 - DNA, 25 bp, probe
ttgtctgaaagccttacctaggaag

SEQ ID NO: 296787 - DNA, 25 bp, probe
ttgtctgaaagccttacctaggaag

SEQ ID NO: 296788 - DNA, 25 bp, probe
ttttgaaagagttctcctcatagga

SEQ ID NO: 296789 - DNA, 25 bp, probe
ttttggcggggtccgcatcgaggag

SEQ ID NO: 296790 - DNA, 25 bp, probe
ttttggcgtggagcttcacagggaa

SEQ ID NO: 296791 - DNA, 25 bp, probe
ttttggggccaagatcaagtggcag

SEQ ID NO: 296792 - DNA, 25 bp, probe
ttacaggctgaggcacggtacgggg

SEQ ID NO: 296793 - DNA, 25 bp, probe
ttagaactgaggtgggctagtgggg

SEQ ID NO: 296794 - DNA, 25 bp, probe
ttaacaccagagttttgtggttgag

SEQ ID NO: 296795 - DNA, 25 bp, probe
ttcaactacaagtatgggtggtcgt

SEQ ID NO: 296796 - DNA, 25 bp, probe
ttatcattaaaggcatggtggagct

SEQ ID NO: 296797 - DNA, 25 bp, probe
ttatgaatccaaggggtggcagcat

SEQ ID NO: 296798 - DNA, 25 bp, probe
ttatctatacggtggtccagcatca

SEQ ID NO: 296799 - DNA, 25 bp, probe
ttatctacaccgtgggccatagcat

SEQ ID NO: 296800 - DNA, 25 bp, probe
ttaatgccagtttagttgacataga

SEQ ID NO: 296801 - DNA, 25 bp, probe
ttatacacatttccagttccatgca

SEQ ID NO: 296802 - DNA, 25 bp, probe
ttatatcctcttctgttgaatgcag

SEQ ID NO: 296803 - DNA, 25 bp, probe
ttattgtcatccattgtggaagagc

SEQ ID NO: 296804 - DNA, 25 bp, probe
ttattgattctcagaagcagaaagc

SEQ ID NO: 296805 - DNA, 25 bp, probe
ttattcattcatcaaaaaacacaga

SEQ ID NO: 296806 - DNA, 25 bp, probe
ttattcattcatcaaaaaacacaga

SEQ ID NO: 296807 - DNA, 25 bp, probe
ttttgacattcatcataacaacaca

SEQ ID NO: 296808 - DNA, 25 bp, probe
ttatctacttcataagtcaatccaa

SEQ ID NO: 296809 - DNA, 25 bp, probe
ttatgccactctggatcaaatctac

SEQ ID NO: 296810 - DNA, 25 bp, probe
ttaggcatctctggcatgccactgt

SEQ ID NO: 296811 - DNA, 25 bp, probe
ttctgcagactcatgcagccctatg

SEQ ID NO: 296812 - DNA, 25 bp, probe
ttctcaggactgccagctcttgatg

SEQ ID NO: 296813 - DNA, 25 bp, probe
ttatctgtgacttcatgctctgata

SEQ ID NO: 296814 - DNA, 25 bp, probe
ttattatgtctgtcttatcatgcaa

SEQ ID NO: 296815 - DNA, 25 bp, probe
ttatttctgctactgttgctgaaat

SEQ ID NO: 296816 - DNA, 25 bp, probe
ttatgcctgcctaagttctgaactg

SEQ ID NO: 296817 - DNA, 25 bp, probe
ttatgcctgttaagctttactgtgc

SEQ ID NO: 296818 - DNA, 25 bp, probe
ttatgttgttattctcggactgtga

SEQ ID NO: 296819 - DNA, 25 bp, probe
ttatattgccaacctcggagatagt

SEQ ID NO: 296820 - DNA, 25 bp, probe
ttatgagggagaccccgacagagga

SEQ ID NO: 296821 - DNA, 25 bp, probe
ttagcagctaagaagcccagacgag

SEQ ID NO: 296822 - DNA, 25 bp, probe
ttatcaggaacgcctcgatacgctg

SEQ ID NO: 296823 - DNA, 25 bp, probe
ttatcctgaacaacatcggacacat

SEQ ID NO: 296824 - DNA, 25 bp, probe
ttatcctgaacaacatcggacacat

SEQ ID NO: 296825 - DNA, 25 bp, probe
ttacccataaacactgccatcatct

SEQ ID NO: 296826 - DNA, 25 bp, probe
ttatcaacatcatattcagcccatc

SEQ ID NO: 296827 - DNA, 25 bp, probe
ttatgcagactaattccacccagtt

SEQ ID NO: 296828 - DNA, 25 bp, probe
ttataaatatttctccagcaaattt

SEQ ID NO: 296829 - DNA, 25 bp, probe
ttacaaatattacctccagggttca

SEQ ID NO: 296830 - DNA, 25 bp, probe
ttacatatgatgcctaccctaagtt

SEQ ID NO: 296831 - DNA, 25 bp, probe
ttaccatatgttgctccagaacttc

SEQ ID NO: 296832 - DNA, 25 bp, probe
ttaccagtgctggtttaaacattca

SEQ ID NO: 296833 - DNA, 25 bp, probe
ttatccctgcttatctgaaacttcc

SEQ ID NO: 296834 - DNA, 25 bp, probe
ttatccctgcttatctgaaacttcc

SEQ ID NO: 296835 - DNA, 25 bp, probe
ttacaccgtggaattgacccttcct

SEQ ID NO: 296836 - DNA, 25 bp, probe
ttacaccgtggaattgacccttcct

SEQ ID NO: 296837 - DNA, 25 bp, probe
ttatcctgcctggtattgtcatcct

SEQ ID NO: 296838 - DNA, 25 bp, probe
ttatcgcctgcagaattccagcttc

SEQ ID NO: 296839 - DNA, 25 bp, probe
ttatacatggatgaatcagccagtg

SEQ ID NO: 296840 - DNA, 25 bp, probe
ttatcacatgtagtcacaacctgtt

SEQ ID NO: 296841 - DNA, 25 bp, probe
ttatcagctgtggcatattacctgt

SEQ ID NO: 296842 - DNA, 25 bp, probe
ttatcggcagtggagctactgctgt

SEQ ID NO: 296843 - DNA, 25 bp, probe
ttatgcgccagaggatgatgacatc

SEQ ID NO: 296844 - DNA, 25 bp, probe
ttatgcgccagaggatgatgacatc

SEQ ID NO: 296845 - DNA, 25 bp, probe
ttatcagccaggtagtacaagactg

SEQ ID NO: 296846 - DNA, 25 bp, probe
ttacagcctgtatttgccaaaacaa

SEQ ID NO: 296847 - DNA, 25 bp, probe
ttacactgcagtatgtcccaagacc

SEQ ID NO: 296848 - DNA, 25 bp, probe
ttagaatggcttgtcccatcagcag

SEQ ID NO: 296849 - DNA, 25 bp, probe
ttagtgctcggggtcaccatgatgc

SEQ ID NO: 296850 - DNA, 25 bp, probe
ttagtgccatggcacactgccacag

SEQ ID NO: 296851 - DNA, 25 bp, probe
ttagtccagtgatgtccatgtcaga

SEQ ID NO: 296852 - DNA, 25 bp, probe
ttagtgagggtgccctggtcatgat

SEQ ID NO: 296853 - DNA, 25 bp, probe
ttttgggtttcattgctgcagatat

SEQ ID NO: 296854 - DNA, 25 bp, probe
ttttgtgtgtttcatgctctggatt

SEQ ID NO: 296855 - DNA, 25 bp, probe
ttgacctgttttcatctgggttaga

SEQ ID NO: 296856 - DNA, 25 bp, probe
ttaccttttcacactggcttgtata

SEQ ID NO: 296857 - DNA, 25 bp, probe
ttacgcttagttatcagctttttaa

SEQ ID NO: 296858 - DNA, 25 bp, probe
ttatagcaatccatgttagttttta

SEQ ID NO: 296859 - DNA, 25 bp, probe
ttattggatgcacttgcttcttttt

SEQ ID NO: 296860 - DNA, 25 bp, probe
ttatctatggcaatgtctttaatct

SEQ ID NO: 296861 - DNA, 25 bp, probe
ttatctctgtgcattcttccaacac

SEQ ID NO: 296862 - DNA, 25 bp, probe
ttatctctgtgcattcttccaacac

SEQ ID NO: 296863 - DNA, 25 bp, probe
ttatttctccttggatacagatacg

SEQ ID NO: 296864 - DNA, 25 bp, probe
ttattcttttatggaacacttcagc

SEQ ID NO: 296865 - DNA, 25 bp, probe
ttattgctactatgtgaaactttca

SEQ ID NO: 296866 - DNA, 25 bp, probe
ttattgctactatgtgaaactttca

SEQ ID NO: 296867 - DNA, 25 bp, probe
ttactgctaatgaggacattcgtcc

SEQ ID NO: 296868 - DNA, 25 bp, probe
ttacgccacatgtgtcacttcattg

SEQ ID NO: 296869 - DNA, 25 bp, probe
ttatccctgcaggagtccttagtgc

SEQ ID NO: 296870 - DNA, 25 bp, probe
ttattttggcaagtctttcgtcttt

SEQ ID NO: 296871 - DNA, 25 bp, probe
ttatctactggatttccgtagtatt

SEQ ID NO: 296872 - DNA, 25 bp, probe
ttatctacggatttagaatgtggta

SEQ ID NO: 296873 - DNA, 25 bp, probe
ttattacaggatctatgtaggtgtt

SEQ ID NO: 296874 - DNA, 25 bp, probe
ttaatacaggaaattaagtgctttt

SEQ ID NO: 296875 - DNA, 25 bp, probe
ttaaagatagttgctaatccttatt

SEQ ID NO: 296876 - DNA, 25 bp, probe
ttaaaaatagctgctaatctgtcaa

SEQ ID NO: 296877 - DNA, 25 bp, probe
ttgaataaatgagttttacgaacca

SEQ ID NO: 296878 - DNA, 25 bp, probe
ttaaaaccacttaaacagcctccag

SEQ ID NO: 296879 - DNA, 25 bp, probe
ttaaaaccacttaaacagcctccag

SEQ ID NO: 296880 - DNA, 25 bp, probe
ttagaacccagtgaaaaataccagg

SEQ ID NO: 296881 - DNA, 25 bp, probe
ttagaagaagcagataaccaaactc

SEQ ID NO: 296882 - DNA, 25 bp, probe
ttagggagcacaaacaagaagagac

SEQ ID NO: 296883 - DNA, 25 bp, probe
ttatgggagagattagacactggag

SEQ ID NO: 296884 - DNA, 25 bp, probe
ttagggcagaggtgcaccctgcagg

SEQ ID NO: 296885 - DNA, 25 bp, probe
ttagggatagtgtccctctccatgt

SEQ ID NO: 296886 - DNA, 25 bp, probe
ttatgggatgggtcactgcctccaa

SEQ ID NO: 296887 - DNA, 25 bp, probe
ttatgggatgggtcactgcctccaa

SEQ ID NO: 296888 - DNA, 25 bp, probe
ttgagggtctggcacatccttaatc

SEQ ID NO: 296889 - DNA, 25 bp, probe
ttggggacatggcagtctccaacac

SEQ ID NO: 296890 - DNA, 25 bp, probe
ttaatggacttgggttccatgaatc

SEQ ID NO: 296891 - DNA, 25 bp, probe
ttgctaggacggtgctgtgactgaa

SEQ ID NO: 296892 - DNA, 25 bp, probe
ttatagttcggctcttgactgagaa

SEQ ID NO: 296893 - DNA, 25 bp, probe
ttatattgggatgacctgaagagaa

SEQ ID NO: 296894 - DNA, 25 bp, probe
ttatatgggatagaaatggcagcaa

SEQ ID NO: 296895 - DNA, 25 bp, probe
ttatagtgttcatcaaagtgccata

SEQ ID NO: 296896 - DNA, 25 bp, probe
ttatcttttttaacagtgcaatcct

SEQ ID NO: 296897 - DNA, 25 bp, probe
ttatcttttttaacagtgcaatcct

SEQ ID NO: 296898 - DNA, 25 bp, probe
ttattattttgcttacatgtgcttt

SEQ ID NO: 296899 - DNA, 25 bp, probe
ttattatctttcttgatactttcca

SEQ ID NO: 296900 - DNA, 25 bp, probe
ttataatttgctggttgcccttcca

SEQ ID NO: 296901 - DNA, 25 bp, probe
ttataatttgctggttgcccttcca

SEQ ID NO: 296902 - DNA, 25 bp, probe
ttataatctgatttgttttcctctt

SEQ ID NO: 296903 - DNA, 25 bp, probe
ttataatctgatttgttttcctctt

SEQ ID NO: 296904 - DNA, 25 bp, probe
ttattgataatgttttgctactctt

SEQ ID NO: 296905 - DNA, 25 bp, probe
ttattgatcaatctctctgcggggt

SEQ ID NO: 296906 - DNA, 25 bp, probe
ttatctgtctaacttggctggtggt

SEQ ID NO: 296907 - DNA, 25 bp, probe
ttatctttagacttcacttgtggtt

SEQ ID NO: 296908 - DNA, 25 bp, probe
ttattgcttcgaaacccagctggtc

SEQ ID NO: 296909 - DNA, 25 bp, probe
ttaggttagccaagaccctggtcct

SEQ ID NO: 296910 - DNA, 25 bp, probe
ttaatttatcagagaccctgccacc

SEQ ID NO: 296911 - DNA, 25 bp, probe
ttaattactcagatactcgtggctt

SEQ ID NO: 296912 - DNA, 25 bp, probe
ttatatacctcattctgacacctgc

SEQ ID NO: 296913 - DNA, 25 bp, probe
ttatatacctcattctgacacctgc

SEQ ID NO: 296914 - DNA, 25 bp, probe
ttatgagacctactgatgtccctga

SEQ ID NO: 296915 - DNA, 25 bp, probe
ttagcagttatgcaatggacctgat

SEQ ID NO: 296916 - DNA, 25 bp, probe
ttcggttacggcatagcctatgtac

SEQ ID NO: 296917 - DNA, 25 bp, probe
ttcggttacggcatagcctatgtac

SEQ ID NO: 296918 - DNA, 25 bp, probe
ttcaggttgacctgtacccatctac

SEQ ID NO: 296919 - DNA, 25 bp, probe
ttaggtggagacttcttcccattcc

SEQ ID NO: 296920 - DNA, 25 bp, probe
ttaggctaagactgcctgtctcata

SEQ ID NO: 296921 - DNA, 25 bp, probe
ttcatggggaactccatttcagcag

SEQ ID NO: 296922 - DNA, 25 bp, probe
ttagctcggacctgcaagttggcgt

SEQ ID NO: 296923 - DNA, 25 bp, probe
ttaccgagcaccagaagtcatcctt

SEQ ID NO: 296924 - DNA, 25 bp, probe
ttaccgagcaccagaagtcatcctt

SEQ ID NO: 296925 - DNA, 25 bp, probe
ttacccagcctggggaggagccttc

SEQ ID NO: 296926 - DNA, 25 bp, probe
ttacccagcctggggaggagccttc

SEQ ID NO: 296927 - DNA, 25 bp, probe
ttacccagcctggggaggagccttc

SEQ ID NO: 296928 - DNA, 25 bp, probe
ttatttcagatttaggaggactcat

SEQ ID NO: 296929 - DNA, 25 bp, probe
ttatttgcagtttacgtatgatctt

SEQ ID NO: 296930 - DNA, 25 bp, probe
ttatattgcagtagtatttattttt

SEQ ID NO: 296931 - DNA, 25 bp, probe
ttatggatgacaacaattttttttt

SEQ ID NO: 296932 - DNA, 25 bp, probe
ttatggatgacaacaattttttttt

SEQ ID NO: 296933 - DNA, 25 bp, probe
ttaggagaaaccagcttttactgtt

SEQ ID NO: 296934 - DNA, 25 bp, probe
ttggggaacggcactgggtaccgtg

SEQ ID NO: 296935 - DNA, 25 bp, probe
ttggggaagtgtatcgagggaccct

SEQ ID NO: 296936 - DNA, 25 bp, probe
ttaagggagactctgggggccctct

SEQ ID NO: 296937 - DNA, 25 bp, probe
ttatagtgccaacacgtggcgcgcc

SEQ ID NO: 296938 - DNA, 25 bp, probe
ttatagtgccaacacgtggcgcgcc

SEQ ID NO: 296939 - DNA, 25 bp, probe
ttatatgatccatgaaccagaacct

SEQ ID NO: 296940 - DNA, 25 bp, probe
ttacttgctaaggaccagaccgcgg

SEQ ID NO: 296941 - DNA, 25 bp, probe
ttacttgctaaggaccagaccgcgg

SEQ ID NO: 296942 - DNA, 25 bp, probe
ttctctttcacggaacaatcccaaa

SEQ ID NO: 296943 - DNA, 25 bp, probe
ttcctcttaacgttagaccacaaat

SEQ ID NO: 296944 - DNA, 25 bp, probe
ttcctcttaacgttagaccacaaat

SEQ ID NO: 296945 - DNA, 25 bp, probe
ttcctaaaaatataaccaacaacag

SEQ ID NO: 296946 - DNA, 25 bp, probe
ttcctaaaaatataaccaacaacag

SEQ ID NO: 296947 - DNA, 25 bp, probe
ttacttaaaatacacatcccagcag

SEQ ID NO: 296948 - DNA, 25 bp, probe
ttacttaacagaacagtcaccgaca

SEQ ID NO: 296949 - DNA, 25 bp, probe
ttattttgtcaaatcttacctagat

SEQ ID NO: 296950 - DNA, 25 bp, probe
ttattttgtcaaatcttacctagat

SEQ ID NO: 296951 - DNA, 25 bp, probe
ttattatttactattacgtgctatt

SEQ ID NO: 296952 - DNA, 25 bp, probe
ttattcttgtttataacagtgcctt

SEQ ID NO: 296953 - DNA, 25 bp, probe
ttgttttttttttatgaggctcctg

SEQ ID NO: 296954 - DNA, 25 bp, probe
ttattttttctttcttggcctcaag

SEQ ID NO: 296955 - DNA, 25 bp, probe
ttatctttcttgatactttccaaat

SEQ ID NO: 296956 - DNA, 25 bp, probe
ttattgttctttcacttattcagaa

SEQ ID NO: 296957 - DNA, 25 bp, probe
ttattgttctttcacttattcagaa

SEQ ID NO: 296958 - DNA, 25 bp, probe
ttatttttattttctatttcgcaca

SEQ ID NO: 296959 - DNA, 25 bp, probe
ttgactttccaaaacgtttccagca

SEQ ID NO: 296960 - DNA, 25 bp, probe
ttatttccacataaaggtatttaga

SEQ ID NO: 296961 - DNA, 25 bp, probe
ttattacagaagatcagttattaaa

SEQ ID NO: 296962 - DNA, 25 bp, probe
ttattaaccgtctgttgaatacaca

SEQ ID NO: 296963 - DNA, 25 bp, probe
ttcaaaccacggagttcacaacaca

SEQ ID NO: 296964 - DNA, 25 bp, probe
ttataaaccggtcgcctctggcagc

SEQ ID NO: 296965 - DNA, 25 bp, probe
ttagcaagacccgcgggtggcacag

SEQ ID NO: 296966 - DNA, 25 bp, probe
ttagcaaagtcctcaatggtaacaa

SEQ ID NO: 296967 - DNA, 25 bp, probe
ttacaaatatttgcttggcaacacg

SEQ ID NO: 296968 - DNA, 25 bp, probe
ttacaaatatttgcttggcaacacg

SEQ ID NO: 296969 - DNA, 25 bp, probe
ttaggagtcttaacattggccagca

SEQ ID NO: 296970 - DNA, 25 bp, probe
ttaggagttaatttttgtcagcaac

SEQ ID NO: 296971 - DNA, 25 bp, probe
ttagttattacttctgtgtgtacaa

SEQ ID NO: 296972 - DNA, 25 bp, probe
ttaattattattcttgccaacaaat

SEQ ID NO: 296973 - DNA, 25 bp, probe
ttaattattattcttgccaacaaat

SEQ ID NO: 296974 - DNA, 25 bp, probe
ttcacttcagaaataataccaacaa

SEQ ID NO: 296975 - DNA, 25 bp, probe
ttatttaaatacacacccagacaca

SEQ ID NO: 296976 - DNA, 25 bp, probe
ttatcttttaccatatcccagtgaa

SEQ ID NO: 296977 - DNA, 25 bp, probe
ttatctgttaactattatccaaaca

SEQ ID NO: 296978 - DNA, 25 bp, probe
ttattcttacactaaatggatcaac

SEQ ID NO: 296979 - DNA, 25 bp, probe
ttattcttgccaacaaatggctaga

SEQ ID NO: 296980 - DNA, 25 bp, probe
ttattcttgccaacaaatggctaga

SEQ ID NO: 296981 - DNA, 25 bp, probe
ttagtttgccaatgattgcctctga

SEQ ID NO: 296982 - DNA, 25 bp, probe
ttatttgtccacttgaagccatatt

SEQ ID NO: 296983 - DNA, 25 bp, probe
ttattctggaagttgatgagtcatc

SEQ ID NO: 296984 - DNA, 25 bp, probe
ttagtgtggcagaataataacatca

SEQ ID NO: 296985 - DNA, 25 bp, probe
ttagtcccagaaataaactgagaag

SEQ ID NO: 296986 - DNA, 25 bp, probe
ttaggccgaggtaaatacagtgaag

SEQ ID NO: 296987 - DNA, 25 bp, probe
ttaggggcagttaaatatcctctac

SEQ ID NO: 296988 - DNA, 25 bp, probe
ttaggaggagtcacagcatacactg

SEQ ID NO: 296989 - DNA, 25 bp, probe
ttagatgagagaacagggctgaagc

SEQ ID NO: 296990 - DNA, 25 bp, probe
ttatgtagagatggcggggggggcg

SEQ ID NO: 296991 - DNA, 25 bp, probe
ttatctagcaagccgctggggcttg

SEQ ID NO: 296992 - DNA, 25 bp, probe
ttactggtcatgcctgctgtgggca

SEQ ID NO: 296993 - DNA, 25 bp, probe
ttaggtgtgcatcgctgtgtagtgt

SEQ ID NO: 296994 - DNA, 25 bp, probe
ttatgtctggagcctggctactctg

SEQ ID NO: 296995 - DNA, 25 bp, probe
ttatgtgctgtgcgtggtgaccatc

SEQ ID NO: 296996 - DNA, 25 bp, probe
ttatacatcttcaggatgattcatc

SEQ ID NO: 296997 - DNA, 25 bp, probe
ttatagcatttatcagctgtggcat

SEQ ID NO: 296998 - DNA, 25 bp, probe
ttaagcatttcccagctgtgtaaaa

SEQ ID NO: 296999 - DNA, 25 bp, probe
ttaggattacccactcatcagaaaa

SEQ ID NO: 297000 - DNA, 25 bp, probe
ttaaactccctcatcaatccaataa

SEQ ID NO: 297001 - DNA, 25 bp, probe
ttactaccacacatgtcaattccaa

SEQ ID NO: 297002 - DNA, 25 bp, probe
ttattagccaaacttgaattctagt

SEQ ID NO: 297003 - DNA, 25 bp, probe
ttattaacagaaattcatatttggt

SEQ ID NO: 297004 - DNA, 25 bp, probe
ttattaactaaaatctatgtgcttt

SEQ ID NO: 297005 - DNA, 25 bp, probe
ttaccaactgccttattatgatctt

SEQ ID NO: 297006 - DNA, 25 bp, probe
ttaccaactgccttattatgatctt

SEQ ID NO: 297007 - DNA, 25 bp, probe
ttagcatcgactctttctttttatt

SEQ ID NO: 297008 - DNA, 25 bp, probe
ttatgcaagagcattgtttcctttc

SEQ ID NO: 297009 - DNA, 25 bp, probe
ttatcaatgattcatgtttccctca

SEQ ID NO: 297010 - DNA, 25 bp, probe
ttatcatcacctcagtttccctgaa

SEQ ID NO: 297011 - DNA, 25 bp, probe
ttatcatcacctcagtttccctgaa

SEQ ID NO: 297012 - DNA, 25 bp, probe
ttatcatactttcctattcccatgt

SEQ ID NO: 297013 - DNA, 25 bp, probe
ttactaatgtgccccatgtccaagt

SEQ ID NO: 297014 - DNA, 25 bp, probe
ttcaaaagtgcctgcagtctgagcc

SEQ ID NO: 297015 - DNA, 25 bp, probe
ttaatgaaattctggtcatgaggga

SEQ ID NO: 297016 - DNA, 25 bp, probe
ttaatgaaacgctgttcagaaacca

SEQ ID NO: 297017 - DNA, 25 bp, probe
ttaattacccttttgcaggcaccac

SEQ ID NO: 297018 - DNA, 25 bp, probe
ttagtatacaatattggggacacca

SEQ ID NO: 297019 - DNA, 25 bp, probe
ttagttagccttttggtggagccgc

SEQ ID NO: 297020 - DNA, 25 bp, probe
ttagtgtttgctatctgttgggccc

SEQ ID NO: 297021 - DNA, 25 bp, probe
ttatggtcttctgttttgaagctca

SEQ ID NO: 297022 - DNA, 25 bp, probe
ttatttcttcatgtgtgtttagtat

SEQ ID NO: 297023 - DNA, 25 bp, probe
ttatttcatccagtttgttctccgg

SEQ ID NO: 297024 - DNA, 25 bp, probe
ttatgtgacatcgcttgttcctaag

SEQ ID NO: 297025 - DNA, 25 bp, probe
ttatagtatcaaattgtttctaacc

SEQ ID NO: 297026 - DNA, 25 bp, probe
ttaatggatccacacatgtactaag

SEQ ID NO: 297027 - DNA, 25 bp, probe
ttagcatgcagagcagcaaagagag

SEQ ID NO: 297028 - DNA, 25 bp, probe
ttagctcaaccaatggagagctgaa

SEQ ID NO: 297029 - DNA, 25 bp, probe
ttcagctaacgcttccagaccgcgg

SEQ ID NO: 297030 - DNA, 25 bp, probe
ttcacttaccagaaagacctgattg

SEQ ID NO: 297031 - DNA, 25 bp, probe
ttcacttaccagaaagacctgattg

SEQ ID NO: 297032 - DNA, 25 bp, probe
ttcttgattccagaaacatatgggc

SEQ ID NO: 297033 - DNA, 25 bp, probe
ttacgcttcagagataccaatgggc

SEQ ID NO: 297034 - DNA, 25 bp, probe
ttaccattcagaggtgcagtgagtt

SEQ ID NO: 297035 - DNA, 25 bp, probe
ttaaattcagacgtactggcttctg

SEQ ID NO: 297036 - DNA, 25 bp, probe
ttagagataaacggcacggcgcttt

SEQ ID NO: 297037 - DNA, 25 bp, probe
ttaatgtaaactaacctcctgcatg

SEQ ID NO: 297038 - DNA, 25 bp, probe
ttcaatttcaattaactcccttggc

SEQ ID NO: 297039 - DNA, 25 bp, probe
ttcactttagtgaagaccctctagg

SEQ ID NO: 297040 - DNA, 25 bp, probe
ttcactttagtgaagaccctctagg

SEQ ID NO: 297041 - DNA, 25 bp, probe
ttatttctgaggccaagcccgaagg

SEQ ID NO: 297042 - DNA, 25 bp, probe
ttattttgagtgtcataactccaca

SEQ ID NO: 297043 - DNA, 25 bp, probe
ttattttcaggttgatgacatcaca

SEQ ID NO: 297044 - DNA, 25 bp, probe
ttattttcaatgtggcatcagatac

SEQ ID NO: 297045 - DNA, 25 bp, probe
ttattttcaatgtggcatcagatac

SEQ ID NO: 297046 - DNA, 25 bp, probe
ttatttgtactgttgatcacatgta

SEQ ID NO: 297047 - DNA, 25 bp, probe
ttattattattgttgttcttattta

SEQ ID NO: 297048 - DNA, 25 bp, probe
ttattactacagtgtttatattaat

SEQ ID NO: 297049 - DNA, 25 bp, probe
ttattcagtacctgtgtttgtgtga

SEQ ID NO: 297050 - DNA, 25 bp, probe
ttgttcgcattgccaaggttctggg

SEQ ID NO: 297051 - DNA, 25 bp, probe
ttagctctgttggcaagggtctggg

SEQ ID NO: 297052 - DNA, 25 bp, probe
ttactctgggatgtggactctggga

SEQ ID NO: 297053 - DNA, 25 bp, probe
ttatctgggtgtctcgcaccataag

SEQ ID NO: 297054 - DNA, 25 bp, probe
ttatctactgtttcctcaccaagaa

SEQ ID NO: 297055 - DNA, 25 bp, probe
ttatgtactttgtccttcagcaaga

SEQ ID NO: 297056 - DNA, 25 bp, probe
ttagaattttggccttctgcactac

SEQ ID NO: 297057 - DNA, 25 bp, probe
ttagcacttttttctttgactcatt

SEQ ID NO: 297058 - DNA, 25 bp, probe
ttaggctgattaattatctctacca

SEQ ID NO: 297059 - DNA, 25 bp, probe
ttatgtgtgaattatatttctacta

SEQ ID NO: 297060 - DNA, 25 bp, probe
ttatgttatgtgtctattacagaat

SEQ ID NO: 297061 - DNA, 25 bp, probe
ttatgttatgtgtctattacagaat

SEQ ID NO: 297062 - DNA, 25 bp, probe
ttatgttagctgtcccactatgctt

SEQ ID NO: 297063 - DNA, 25 bp, probe
ttacatgttgcttccagacatactt

SEQ ID NO: 297064 - DNA, 25 bp, probe
ttactgcttgtctctcaaggctgct

SEQ ID NO: 297065 - DNA, 25 bp, probe
ttatcttctatatcttcaggcgcgc

SEQ ID NO: 297066 - DNA, 25 bp, probe
ttatttgcctctactacgtcaggca

SEQ ID NO: 297067 - DNA, 25 bp, probe
ttacttgcctatctgacttcataca

SEQ ID NO: 297068 - DNA, 25 bp, probe
ttagtctggcttcatgttttacatc

SEQ ID NO: 297069 - DNA, 25 bp, probe
ttagattgcacagttaattttcact

SEQ ID NO: 297070 - DNA, 25 bp, probe
ttactgtgactttatgcttttcgtg

SEQ ID NO: 297071 - DNA, 25 bp, probe
ttactgtgactttatgcttttcgtg

SEQ ID NO: 297072 - DNA, 25 bp, probe
ttactggagcccttcacttatgcag

SEQ ID NO: 297073 - DNA, 25 bp, probe
ttacttagcaactgccttatcaatt

SEQ ID NO: 297074 - DNA, 25 bp, probe
ttagatttctcatttgccaataata

SEQ ID NO: 297075 - DNA, 25 bp, probe
ttagctgtcctgtttgtaatgcaat

SEQ ID NO: 297076 - DNA, 25 bp, probe
ttagctctcactttcaagaagcaat

SEQ ID NO: 297077 - DNA, 25 bp, probe
ttagttactcattcagggatagcac

SEQ ID NO: 297078 - DNA, 25 bp, probe
ttagcctagctagcacagttagtgc

SEQ ID NO: 297079 - DNA, 25 bp, probe
ttatgccttcaatactcgcaagtgc

SEQ ID NO: 297080 - DNA, 25 bp, probe
ttatgaccccaacgctggagcagta

SEQ ID NO: 297081 - DNA, 25 bp, probe
ttatgaccccaacgctggagcagta

SEQ ID NO: 297082 - DNA, 25 bp, probe
ttaggccagccatggtggctcacgt

SEQ ID NO: 297083 - DNA, 25 bp, probe
ttaggcctggcacagtgtctgggct

SEQ ID NO: 297084 - DNA, 25 bp, probe
ttagggctcatcaaatgctgtctga

SEQ ID NO: 297085 - DNA, 25 bp, probe
ttatgcagaccagcaagctgtgaga

SEQ ID NO: 297086 - DNA, 25 bp, probe
ttatcacagcaaggacactcatgaa

SEQ ID NO: 297087 - DNA, 25 bp, probe
ttatcctgcatggtatcactaaagg

SEQ ID NO: 297088 - DNA, 25 bp, probe
ttatcaagcatccatctgactaagg

SEQ ID NO: 297089 - DNA, 25 bp, probe
ttcatcaactttgtgctaaggaggc

SEQ ID NO: 297090 - DNA, 25 bp, probe
ttacggcttttaatgcgggagctgc

SEQ ID NO: 297091 - DNA, 25 bp, probe
ttatcccatcttgattggggcagtt

SEQ ID NO: 297092 - DNA, 25 bp, probe
ttctcccagtgtgaggagtggagct

SEQ ID NO: 297093 - DNA, 25 bp, probe
ttcaccaactgtcagaaggcaacca

SEQ ID NO: 297094 - DNA, 25 bp, probe
ttaggaatgtgtcaaatgggagcca

SEQ ID NO: 297095 - DNA, 25 bp, probe
ttagatgacattgcagaactggtgg

SEQ ID NO: 297096 - DNA, 25 bp, probe
ttacatggcacccgaagctttgcgg

SEQ ID NO: 297097 - DNA, 25 bp, probe
ttacatgtatctgaggcagctattc

SEQ ID NO: 297098 - DNA, 25 bp, probe
ttacatttttggagcatgcactgcc

SEQ ID NO: 297099 - DNA, 25 bp, probe
ttactaattcggacctgactgatgc

SEQ ID NO: 297100 - DNA, 25 bp, probe
ttactaattcggacctgactgatgc

SEQ ID NO: 297101 - DNA, 25 bp, probe
ttatcgcagcttggggccaactgac

SEQ ID NO: 297102 - DNA, 25 bp, probe
ttagcatcacttgaccctattgacc

SEQ ID NO: 297103 - DNA, 25 bp, probe
ttaccctggcattccggttgatgct

SEQ ID NO: 297104 - DNA, 25 bp, probe
ttaaatctgccatctcaggcctggc

SEQ ID NO: 297105 - DNA, 25 bp, probe
ttaaactgaatgaccagacttgctg

SEQ ID NO: 297106 - DNA, 25 bp, probe
ttaccactgcacagaggagcggctg

SEQ ID NO: 297107 - DNA, 25 bp, probe
ttacgagcagctgtgagtgagggga

SEQ ID NO: 297108 - DNA, 25 bp, probe
ttactgatgccgatcgtcaggccga

SEQ ID NO: 297109 - DNA, 25 bp, probe
ttactggaagatcctggcggcgcag

SEQ ID NO: 297110 - DNA, 25 bp, probe
ttactctgagtaactggccagccat

SEQ ID NO: 297111 - DNA, 25 bp, probe
ttatttaggtccagcagctacattt

SEQ ID NO: 297112 - DNA, 25 bp, probe
ttatttaggggcctggcttgctgct

SEQ ID NO: 297113 - DNA, 25 bp, probe
ttatatctcaggtggtgctgacccc

SEQ ID NO: 297114 - DNA, 25 bp, probe
ttatgtgtacagttggttcatccct

SEQ ID NO: 297115 - DNA, 25 bp, probe
ttatgttacttctagtgttcacctc

SEQ ID NO: 297116 - DNA, 25 bp, probe
ttatatctcatctttgagtttcttt

SEQ ID NO: 297117 - DNA, 25 bp, probe
ttagtatgctattaagtcattctga

SEQ ID NO: 297118 - DNA, 25 bp, probe
ttaatacatgaacagcctttgccaa

SEQ ID NO: 297119 - DNA, 25 bp, probe
ttatgatgactgccattatctcttt

SEQ ID NO: 297120 - DNA, 25 bp, probe
ttatgagaaggttcacatgtgtttt

SEQ ID NO: 297121 - DNA, 25 bp, probe
ttacaacaagcatgcacattttggt

SEQ ID NO: 297122 - DNA, 25 bp, probe
ttatatatacagtaactttatgtgt

SEQ ID NO: 297123 - DNA, 25 bp, probe
ttaaaggatggaaatttatcatgtt

SEQ ID NO: 297124 - DNA, 25 bp, probe
ttagaagttcggcactttcagtgtc

SEQ ID NO: 297125 - DNA, 25 bp, probe
ttaacctcacggcccatgattacgt

SEQ ID NO: 297126 - DNA, 25 bp, probe
ttaacctcacggcccatgattacgt

SEQ ID NO: 297127 - DNA, 25 bp, probe
ttaccctcaagtccgatttgtctgt

SEQ ID NO: 297128 - DNA, 25 bp, probe
ttatgacctcaaattccatccttca

SEQ ID NO: 297129 - DNA, 25 bp, probe
ttatagcccaaactcaactctcaat

SEQ ID NO: 297130 - DNA, 25 bp, probe
ttaggagctagggtagaatataatt

SEQ ID NO: 297131 - DNA, 25 bp, probe
ttaggactcacgttaactcacattt

SEQ ID NO: 297132 - DNA, 25 bp, probe
ttagtccgaatgttagattcctctt

SEQ ID NO: 297133 - DNA, 25 bp, probe
ttatgtataatacttagatcctcct

SEQ ID NO: 297134 - DNA, 25 bp, probe
ttatgaaagtagagagatctgccct

SEQ ID NO: 297135 - DNA, 25 bp, probe
ttatgaaatgtacttccctccatct

SEQ ID NO: 297136 - DNA, 25 bp, probe
ttatgaaatgtacttccctccatct

SEQ ID NO: 297137 - DNA, 25 bp, probe
ttataaagtcatctcttctctgcct

SEQ ID NO: 297138 - DNA, 25 bp, probe
ttaaaatgtcgcttttcatctcctg

SEQ ID NO: 297139 - DNA, 25 bp, probe
ttaagccatgcttgctcattgtacc

SEQ ID NO: 297140 - DNA, 25 bp, probe
ttaagccatgcttgctcattgtacc

SEQ ID NO: 297141 - DNA, 25 bp, probe
ttatacacagctttatgatatcaaa

SEQ ID NO: 297142 - DNA, 25 bp, probe
ttatacaagcatgcccaatcttaga

SEQ ID NO: 297143 - DNA, 25 bp, probe
ttatataatatctcataatagtaga

SEQ ID NO: 297144 - DNA, 25 bp, probe
ttataacttatccatatgcatgatg

SEQ ID NO: 297145 - DNA, 25 bp, probe
ttatctagttaccaatgctgcagtc

SEQ ID NO: 297146 - DNA, 25 bp, probe
ttagctcatgactctgcaaggcagt

SEQ ID NO: 297147 - DNA, 25 bp, probe
ttactaacttctccgcaagttgtcc

SEQ ID NO: 297148 - DNA, 25 bp, probe
ttcagaaactaccaccaaattatcc

SEQ ID NO: 297149 - DNA, 25 bp, probe
ttatgaaacccttgacattaatact

SEQ ID NO: 297150 - DNA, 25 bp, probe
ttaaacagcctccagtcataaaaat

SEQ ID NO: 297151 - DNA, 25 bp, probe
ttaaacagcctccagtcataaaaat

SEQ ID NO: 297152 - DNA, 25 bp, probe
ttaggacgactcagtatccgagagc

SEQ ID NO: 297153 - DNA, 25 bp, probe
ttaggaacccggcatgccgagtgcc

SEQ ID NO: 297154 - DNA, 25 bp, probe
ttaggaatactccacggccgtggac

SEQ ID NO: 297155 - DNA, 25 bp, probe
ttagagtacttgcacggcaagggca

SEQ ID NO: 297156 - DNA, 25 bp, probe
ttagggatctagctcttcgagtgga

SEQ ID NO: 297157 - DNA, 25 bp, probe
ttagagagctaagattatctgggga

SEQ ID NO: 297158 - DNA, 25 bp, probe
ttaggcagctatgggtttcttttga

SEQ ID NO: 297159 - DNA, 25 bp, probe
ttaggactgtgtagttgtatatttg

SEQ ID NO: 297160 - DNA, 25 bp, probe
ttagtgcactttgttttatataata

SEQ ID NO: 297161 - DNA, 25 bp, probe
ttaggttcttctgtttcttacaaca

SEQ ID NO: 297162 - DNA, 25 bp, probe
ttgttatcttttgtgtcctgtaacc

SEQ ID NO: 297163 - DNA, 25 bp, probe
ttatcctttaatgtgaccttaaatg

SEQ ID NO: 297164 - DNA, 25 bp, probe
ttatcaatttgattctaggtaaaaa

SEQ ID NO: 297165 - DNA, 25 bp, probe
ttacatcgttcatccggtggaaaca

SEQ ID NO: 297166 - DNA, 25 bp, probe
ttactgggtcactcccattggaaat

SEQ ID NO: 297167 - DNA, 25 bp, probe
ttagtggattgagccctcttggaaa

SEQ ID NO: 297168 - DNA, 25 bp, probe
ttagtggattgagccctcttggaaa

SEQ ID NO: 297169 - DNA, 25 bp, probe
ttaaggagctgaacgtgtttggacc

SEQ ID NO: 297170 - DNA, 25 bp, probe
ttaagggcgatgcctgggtttacaa

SEQ ID NO: 297171 - DNA, 25 bp, probe
ttaatgcgggagctgcgatttacac

SEQ ID NO: 297172 - DNA, 25 bp, probe
ttaccgccaaggccgcattgctaag

SEQ ID NO: 297173 - DNA, 25 bp, probe
ttaccagtatagcttgcatagtcaa

SEQ ID NO: 297174 - DNA, 25 bp, probe
ttatcacaggattttgttatgttac

SEQ ID NO: 297175 - DNA, 25 bp, probe
ttatacatggcttcttttatgaata

SEQ ID NO: 297176 - DNA, 25 bp, probe
ttatgactgttgttcttataagaag

SEQ ID NO: 297177 - DNA, 25 bp, probe
ttatgatagatttgctctctagaag

SEQ ID NO: 297178 - DNA, 25 bp, probe
ttaatatgcaagactctcaaggagt

SEQ ID NO: 297179 - DNA, 25 bp, probe
ttagatgagatagcgcataataagg

SEQ ID NO: 297180 - DNA, 25 bp, probe
ttctagagatagtacataaaggtgg

SEQ ID NO: 297181 - DNA, 25 bp, probe
ttctaagtaaaaccacagcagttga

SEQ ID NO: 297182 - DNA, 25 bp, probe
ttgcttcaggcaattgacccctgtc

SEQ ID NO: 297183 - DNA, 25 bp, probe
ttgcttcaggcaattgacccctgtc

SEQ ID NO: 297184 - DNA, 25 bp, probe
ttatgctcggccaaaggcactttca

SEQ ID NO: 297185 - DNA, 25 bp, probe
ttgctctcgactcaagaaggttaac

SEQ ID NO: 297186 - DNA, 25 bp, probe
ttcattcgaccagagttcttggaac

SEQ ID NO: 297187 - DNA, 25 bp, probe
ttcattcgaccagagttcttggaac

SEQ ID NO: 297188 - DNA, 25 bp, probe
ttagactcaccagagatattgtgga

SEQ ID NO: 297189 - DNA, 25 bp, probe
ttatcattccctgatgtgttgtgtc

SEQ ID NO: 297190 - DNA, 25 bp, probe
ttatcaatcccgttttgacatgttc

SEQ ID NO: 297191 - DNA, 25 bp, probe
ttagcgatcccggtcggaaatgctg

SEQ ID NO: 297192 - DNA, 25 bp, probe
ttatcgaccggcacaaacagctgcg

SEQ ID NO: 297193 - DNA, 25 bp, probe
ttatcattccatggcaccaaacgct

SEQ ID NO: 297194 - DNA, 25 bp, probe
ttagaagcctcgtaccaatcatctt

SEQ ID NO: 297195 - DNA, 25 bp, probe
ttatgtattccacacgtcaatcttc

SEQ ID NO: 297196 - DNA, 25 bp, probe
ttactattccataactccagacatc

SEQ ID NO: 297197 - DNA, 25 bp, probe
ttactattccataactccagacatc

SEQ ID NO: 297198 - DNA, 25 bp, probe
ttatctgaccaatagtacacacaca

SEQ ID NO: 297199 - DNA, 25 bp, probe
ttacattcaaattcagttactcacc

SEQ ID NO: 297200 - DNA, 25 bp, probe
ttccaaagaacggcctacataccca

SEQ ID NO: 297201 - DNA, 25 bp, probe
ttacaaagaatccacctgacttccc

SEQ ID NO: 297202 - DNA, 25 bp, probe
ttcaccaagcttgaccgcattggca

SEQ ID NO: 297203 - DNA, 25 bp, probe
ttacctagcttggcctagagtggca

SEQ ID NO: 297204 - DNA, 25 bp, probe
ttaccatcatgtatccagtagtgga

SEQ ID NO: 297205 - DNA, 25 bp, probe
ttacgtcgaagcacatggaggatga

SEQ ID NO: 297206 - DNA, 25 bp, probe
ttacgtcgaagcacatggaggatga

SEQ ID NO: 297207 - DNA, 25 bp, probe
ttatcaaaaagctaatgtgcaggga

SEQ ID NO: 297208 - DNA, 25 bp, probe
ttaaagaaacaggattcagtgtgaa

SEQ ID NO: 297209 - DNA, 25 bp, probe
ttaaaggggcaggagaatggacaac

SEQ ID NO: 297210 - DNA, 25 bp, probe
ttcaaagggacacctacggcagaga

SEQ ID NO: 297211 - DNA, 25 bp, probe
ttaacaggtactctaagaatgatga

SEQ ID NO: 297212 - DNA, 25 bp, probe
ttaaagagttccacaagcagattac

SEQ ID NO: 297213 - DNA, 25 bp, probe
ttactaacttccaacactcagtgtt

SEQ ID NO: 297214 - DNA, 25 bp, probe
ttactcactttactaaacagtttgg

SEQ ID NO: 297215 - DNA, 25 bp, probe
ttcactccgttgatcagaaagtttt

SEQ ID NO: 297216 - DNA, 25 bp, probe
ttatctcccacgactcagtgaagtt

SEQ ID NO: 297217 - DNA, 25 bp, probe
ttatccctgaaacctgcatagagtt

SEQ ID NO: 297218 - DNA, 25 bp, probe
ttagccaaaagactcctgcaggtgt

SEQ ID NO: 297219 - DNA, 25 bp, probe
ttaccaggcaaagcactgcgcgctt

SEQ ID NO: 297220 - DNA, 25 bp, probe
ttatccgactaaggactctgggctg

SEQ ID NO: 297221 - DNA, 25 bp, probe
ttacaaacatacagccatctggggt

SEQ ID NO: 297222 - DNA, 25 bp, probe
ttatcacaatgaaagggctcggaag

SEQ ID NO: 297223 - DNA, 25 bp, probe
ttatcaccatgaccagctggacaga

SEQ ID NO: 297224 - DNA, 25 bp, probe
ttatcaaatgataactggaagctga

SEQ ID NO: 297225 - DNA, 25 bp, probe
ttacagaatatatcttatcgctaaa

SEQ ID NO: 297226 - DNA, 25 bp, probe
ttacagaatatatcttatcgctaaa

SEQ ID NO: 297227 - DNA, 25 bp, probe
ttaaactcattccatatgcatctgt

SEQ ID NO: 297228 - DNA, 25 bp, probe
ttctaagcatatggctaagactgta

SEQ ID NO: 297229 - DNA, 25 bp, probe
ttcatgtcaggcgttaaactgtcag

SEQ ID NO: 297230 - DNA, 25 bp, probe
ttatctgcacagacttagaccttca

SEQ ID NO: 297231 - DNA, 25 bp, probe
ttatcatccatgactttatccttga

SEQ ID NO: 297232 - DNA, 25 bp, probe
ttatcaccattcttatgtcacttta

SEQ ID NO: 297233 - DNA, 25 bp, probe
ttactccttcagccattgcagtgat

SEQ ID NO: 297234 - DNA, 25 bp, probe
ttagctttgtggcttcctgatggca

SEQ ID NO: 297235 - DNA, 25 bp, probe
ttatgctgtgttagtttcgttgtca

SEQ ID NO: 297236 - DNA, 25 bp, probe
ttatgctgtgttagtttcgttgtca

SEQ ID NO: 297237 - DNA, 25 bp, probe
ttatgggtttggcttgtttttcttg

SEQ ID NO: 297238 - DNA, 25 bp, probe
ttagtggtgtttcttgtttcctctg

SEQ ID NO: 297239 - DNA, 25 bp, probe
ttatgttggtttccttgtttcttca

SEQ ID NO: 297240 - DNA, 25 bp, probe
ttgttggctggacactgttttttca

SEQ ID NO: 297241 - DNA, 25 bp, probe
ttgtgggggagggttggtggtatat

SEQ ID NO: 297242 - DNA, 25 bp, probe
ttgtgggggagggttggtggtatat

SEQ ID NO: 297243 - DNA, 25 bp, probe
ttggtgtgtgggagaagttttataa

SEQ ID NO: 297244 - DNA, 25 bp, probe
ttgggtctgggatgaagtatttatc

SEQ ID NO: 297245 - DNA, 25 bp, probe
ttagtgtttgggtatattcatttca

SEQ ID NO: 297246 - DNA, 25 bp, probe
ttcactgtgttgtaggttttggctc

SEQ ID NO: 297247 - DNA, 25 bp, probe
ttactgtttcacgtgtacctgtgtc

SEQ ID NO: 297248 - DNA, 25 bp, probe
ttacttctccacagtgaagattatc

SEQ ID NO: 297249 - DNA, 25 bp, probe
ttatcccactgggttgggattatgc

SEQ ID NO: 297250 - DNA, 25 bp, probe
ttatcctagtggtaatggttatatg

SEQ ID NO: 297251 - DNA, 25 bp, probe
ttatggctatgttggagtttttatg

SEQ ID NO: 297252 - DNA, 25 bp, probe
ttatggtggtatgtcttttctatgg

SEQ ID NO: 297253 - DNA, 25 bp, probe
ttaggtggtgctggtttatgttcta

SEQ ID NO: 297254 - DNA, 25 bp, probe
ttaggatattgctcaaaattatata

SEQ ID NO: 297255 - DNA, 25 bp, probe
ttaacatttgcaggacacttttaca

SEQ ID NO: 297256 - DNA, 25 bp, probe
ttacctttggatccatttgtcaact

SEQ ID NO: 297257 - DNA, 25 bp, probe
ttagcactttggtagcttttacact

SEQ ID NO: 297258 - DNA, 25 bp, probe
ttagcactttggtagcttttacact

SEQ ID NO: 297259 - DNA, 25 bp, probe
ttatctcttatgctttcattttctc

SEQ ID NO: 297260 - DNA, 25 bp, probe
ttagagctaaccgtactctcttctc

SEQ ID NO: 297261 - DNA, 25 bp, probe
ttagaaaatcatgtacttcgcttaa

SEQ ID NO: 297262 - DNA, 25 bp, probe
ttatgtaagtctgatcctatggctt

SEQ ID NO: 297263 - DNA, 25 bp, probe
ttatgatagtttgtcctgtgtcctt

SEQ ID NO: 297264 - DNA, 25 bp, probe
ttatctcagatcatggtcggattcc

SEQ ID NO: 297265 - DNA, 25 bp, probe
ttatctgcactcagagcgcaagatc

SEQ ID NO: 297266 - DNA, 25 bp, probe
ttatctgatccttgtggcacacaac

SEQ ID NO: 297267 - DNA, 25 bp, probe
ttatcatgacctagtgcccagtgac

SEQ ID NO: 297268 - DNA, 25 bp, probe
ttatctcactctagtccaggtgcca

SEQ ID NO: 297269 - DNA, 25 bp, probe
ttatccgcttttcagaggtgctgat

SEQ ID NO: 297270 - DNA, 25 bp, probe
ttacaggatctatgtaggtgttgat

SEQ ID NO: 297271 - DNA, 25 bp, probe
ttacatggcaatcaaagccttttga

SEQ ID NO: 297272 - DNA, 25 bp, probe
ttcacagtcctcagaagcctatttt

SEQ ID NO: 297273 - DNA, 25 bp, probe
ttaagtttcttatcactgtattttc

SEQ ID NO: 297274 - DNA, 25 bp, probe
ttaaggtacatcattattgtagttt

SEQ ID NO: 297275 - DNA, 25 bp, probe
ttaacagaaattcatatttggtgtg

SEQ ID NO: 297276 - DNA, 25 bp, probe
ttaaacaaactctcatttgactgtg

SEQ ID NO: 297277 - DNA, 25 bp, probe
ttaaaaacgccaccttgggctcgag

SEQ ID NO: 297278 - DNA, 25 bp, probe
ttcacatgctaaagccaggattgtg

SEQ ID NO: 297279 - DNA, 25 bp, probe
ttagcatgtgaaagcctctctggct

SEQ ID NO: 297280 - DNA, 25 bp, probe
ttatgatatcaaagactcattgctt

SEQ ID NO: 297281 - DNA, 25 bp, probe
ttatgtcaccagcgcacacgctgat

SEQ ID NO: 297282 - DNA, 25 bp, probe
ttagtcaacatgctgctctccagca

SEQ ID NO: 297283 - DNA, 25 bp, probe
ttagttcagctgctggcactcgcag

SEQ ID NO: 297284 - DNA, 25 bp, probe
ttagtatagatgctgacctccatca

SEQ ID NO: 297285 - DNA, 25 bp, probe
acacctgctgagtaaaacaaatatt

SEQ ID NO: 297286 - DNA, 25 bp, probe
ttaccttctgtgtgcttcacatcac

SEQ ID NO: 297287 - DNA, 25 bp, probe
ttaccttctgtgtgctactgacgta

SEQ ID NO: 297288 - DNA, 25 bp, probe
ttaccttctgtgtgctactgacgta

SEQ ID NO: 297289 - DNA, 25 bp, probe
ttaacttcatgtgagctattggagt

SEQ ID NO: 297290 - DNA, 25 bp, probe
ttatctttcagcgcagcttgtgaga

SEQ ID NO: 297291 - DNA, 25 bp, probe
ttcactttacctagcagggaaaaat

SEQ ID NO: 297292 - DNA, 25 bp, probe
ttcatcgttcatctaggggaagaca

SEQ ID NO: 297293 - DNA, 25 bp, probe
ttcacttttgcagattgggtaacac

SEQ ID NO: 297294 - DNA, 25 bp, probe
ttacgactccatgggtgggataaac

SEQ ID NO: 297295 - DNA, 25 bp, probe
ttaccaccctggctgtgatgggaac

SEQ ID NO: 297296 - DNA, 25 bp, probe
ttaccaccgtggatgactggctcag

SEQ ID NO: 297297 - DNA, 25 bp, probe
ttaatcccggtttcagaagctgcag

SEQ ID NO: 297298 - DNA, 25 bp, probe
ttaatcccggtttcagaagctgcag

SEQ ID NO: 297299 - DNA, 25 bp, probe
ttagcaccgcaggtgtagagaaggc

SEQ ID NO: 297300 - DNA, 25 bp, probe
ttaccttcagctgctaggaagagct

SEQ ID NO: 297301 - DNA, 25 bp, probe
ttatcctgttctgctacgtggagat

SEQ ID NO: 297302 - DNA, 25 bp, probe
ttaccttcattcgtgacagtggaca

SEQ ID NO: 297303 - DNA, 25 bp, probe
ttagtttgatcttccatggtggaca

SEQ ID NO: 297304 - DNA, 25 bp, probe
ttatgttctgcaatatcctgcagct

SEQ ID NO: 297305 - DNA, 25 bp, probe
ttatgtgtcatcaatgtacatgcca

SEQ ID NO: 297306 - DNA, 25 bp, probe
ttatggactctcagacactcagaag

SEQ ID NO: 297307 - DNA, 25 bp, probe
ttagagacatctacgacttccgaga

SEQ ID NO: 297308 - DNA, 25 bp, probe
ttagcatgacattcggggaaaggag

SEQ ID NO: 297309 - DNA, 25 bp, probe
ttagctgcgcatttgcggggctggg

SEQ ID NO: 297310 - DNA, 25 bp, probe
ttagctgcgcatttgcggggctggg

SEQ ID NO: 297311 - DNA, 25 bp, probe
ttagggctctgtgagaggtggggca

SEQ ID NO: 297312 - DNA, 25 bp, probe
ttaagttcattctgggtcgcagcca

SEQ ID NO: 297313 - DNA, 25 bp, probe
ttaagcaaatacttaagtccaagca

SEQ ID NO: 297314 - DNA, 25 bp, probe
ttagaaaccagatacgctcaaagca

SEQ ID NO: 297315 - DNA, 25 bp, probe
ttagaaaccagatacgctcaaagca

SEQ ID NO: 297316 - DNA, 25 bp, probe
ttatgtataatggataagcccaaaa

SEQ ID NO: 297317 - DNA, 25 bp, probe
ttatgtataatggataagcccaaaa

SEQ ID NO: 297318 - DNA, 25 bp, probe
ttatgtgaagtgtctagagcccttt

SEQ ID NO: 297319 - DNA, 25 bp, probe
ttatctgtacagtcatggacccttt

SEQ ID NO: 297320 - DNA, 25 bp, probe
ttatctgtaaaacacctatttggga

SEQ ID NO: 297321 - DNA, 25 bp, probe
ttaagtaacaactacctattatgtg

SEQ ID NO: 297322 - DNA, 25 bp, probe
ttcaaacaaaacccagctcctgagt

SEQ ID NO: 297323 - DNA, 25 bp, probe
ttaacatagagaactgtcaccctga

SEQ ID NO: 297324 - DNA, 25 bp, probe
ttagaataagtgcattgcccactga

SEQ ID NO: 297325 - DNA, 25 bp, probe
ttaaatactgtggttgcctctatgt

SEQ ID NO: 297326 - DNA, 25 bp, probe
ttaaaaatgtggttgcttaattcct

SEQ ID NO: 297327 - DNA, 25 bp, probe
ttaataaatgtgccttcattttttc

SEQ ID NO: 297328 - DNA, 25 bp, probe
ttacaagaagtacgaatcttatttt

SEQ ID NO: 297329 - DNA, 25 bp, probe
ttaattgaagaactgcacttttttt

SEQ ID NO: 297330 - DNA, 25 bp, probe
ttaattccgatactagtttgctttg

SEQ ID NO: 297331 - DNA, 25 bp, probe
ttatgttactcagaattttgctttg

SEQ ID NO: 297332 - DNA, 25 bp, probe
ttatccaactctgaatcttttttca

SEQ ID NO: 297333 - DNA, 25 bp, probe
ttaacaactttatcctattctacaa

SEQ ID NO: 297334 - DNA, 25 bp, probe
ttaacaactttatcctattctacaa

SEQ ID NO: 297335 - DNA, 25 bp, probe
ttcaataagttatacctcatctcta

SEQ ID NO: 297336 - DNA, 25 bp, probe
ttacacgattataattcccctgcta

SEQ ID NO: 297337 - DNA, 25 bp, probe
ttacacgattataattcccctgcta

SEQ ID NO: 297338 - DNA, 25 bp, probe
ttatcccatatatagttcagcctta

SEQ ID NO: 297339 - DNA, 25 bp, probe
ttatcgcattcatgtcagtctcagc

SEQ ID NO: 297340 - DNA, 25 bp, probe
ttaccatgtcattgatcacaacagc

SEQ ID NO: 297341 - DNA, 25 bp, probe
ttaccatgctcaatgaaaaggtgat

SEQ ID NO: 297342 - DNA, 25 bp, probe
ttaccgccatcataaagattgagta

SEQ ID NO: 297343 - DNA, 25 bp, probe
ttacctgcctaaaatatgatgttta

SEQ ID NO: 297344 - DNA, 25 bp, probe
ttacccccttctaatgtttgcataa

SEQ ID NO: 297345 - DNA, 25 bp, probe
ttacctgtcactattgtgccttctt

SEQ ID NO: 297346 - DNA, 25 bp, probe
ttacgcttcagctgttgatccgctg

SEQ ID NO: 297347 - DNA, 25 bp, probe
ttacgcttcagctgttgatccgctg

SEQ ID NO: 297348 - DNA, 25 bp, probe
ttaagatgctaccttgtgacccagc

SEQ ID NO: 297349 - DNA, 25 bp, probe
ttcagagtaacacaggattcactgt

SEQ ID NO: 297350 - DNA, 25 bp, probe
ttctactacagcccggaatgccggg

SEQ ID NO: 297351 - DNA, 25 bp, probe
ttcaacccatggtgggacacggagt

SEQ ID NO: 297352 - DNA, 25 bp, probe
ttcacactggaagggggacctgcgc

SEQ ID NO: 297353 - DNA, 25 bp, probe
ttcacactggaagggggacctgcgc

SEQ ID NO: 297354 - DNA, 25 bp, probe
ttcaccagaaaaggagaactgcgac

SEQ ID NO: 297355 - DNA, 25 bp, probe
ttgcacacaaaaataaagactagag

SEQ ID NO: 297356 - DNA, 25 bp, probe
ttagcatcaaagtcaaacagatcca

SEQ ID NO: 297357 - DNA, 25 bp, probe
ttagcaaacgtcccacaatcgcaga

SEQ ID NO: 297358 - DNA, 25 bp, probe
ttagaagtccttcccatgatacaga

SEQ ID NO: 297359 - DNA, 25 bp, probe
ttagaacttcaacctcaggacagac

SEQ ID NO: 297360 - DNA, 25 bp, probe
ttaaagttctaccaacgagctgcaa

SEQ ID NO: 297361 - DNA, 25 bp, probe
ttaaactattaccacacagcccata

SEQ ID NO: 297362 - DNA, 25 bp, probe
ttaaaggattaccatcgaccttctg

SEQ ID NO: 297363 - DNA, 25 bp, probe
ttagagatgaactccttggcctcct

SEQ ID NO: 297364 - DNA, 25 bp, probe
ttagagatgaactccttggcctcct

SEQ ID NO: 297365 - DNA, 25 bp, probe
ttcagagctgtaaaacatctgaacc

SEQ ID NO: 297366 - DNA, 25 bp, probe
ttcaggggaaaggtctgagtctcca

SEQ ID NO: 297367 - DNA, 25 bp, probe
ttgcaagggaaaatccaagtcttcc

SEQ ID NO: 297368 - DNA, 25 bp, probe
ttcaacccgtgattccaagtgctta

SEQ ID NO: 297369 - DNA, 25 bp, probe
ttcaacccgtgattccaagtgctta

SEQ ID NO: 297370 - DNA, 25 bp, probe
ttacctcggataccacaagtgcttt

SEQ ID NO: 297371 - DNA, 25 bp, probe
ttcgcctcggaatccaaggtgtagg

SEQ ID NO: 297372 - DNA, 25 bp, probe
ttactgcacgggcaacaaaggatgg

SEQ ID NO: 297373 - DNA, 25 bp, probe
ttactcacagcgctctgacatactt

SEQ ID NO: 297374 - DNA, 25 bp, probe
ttacctactcagtgaaagcttcagg

SEQ ID NO: 297375 - DNA, 25 bp, probe
ttaacttcatggtgaatagtcaaga

SEQ ID NO: 297376 - DNA, 25 bp, probe
ttacatgctcctggaaattttaaga

SEQ ID NO: 297377 - DNA, 25 bp, probe
ttaagtcccagatcttgcttaagaa

SEQ ID NO: 297378 - DNA, 25 bp, probe
ttaaactctgaataggcattaaaaa

SEQ ID NO: 297379 - DNA, 25 bp, probe
ttaaagctcgaaaacaattgtaata

SEQ ID NO: 297380 - DNA, 25 bp, probe
ttaaagctcgaaaacaattgtaata

SEQ ID NO: 297381 - DNA, 25 bp, probe
ttaaagccagcatccagaatttcct

SEQ ID NO: 297382 - DNA, 25 bp, probe
ttagaagactctaccagactgtgta

SEQ ID NO: 297383 - DNA, 25 bp, probe
ttagaaggcttcctcatttggatat

SEQ ID NO: 297384 - DNA, 25 bp, probe
ttaggaacatatgctcatttgagaa

SEQ ID NO: 297385 - DNA, 25 bp, probe
ttagtgacttcggttgctctgagaa

SEQ ID NO: 297386 - DNA, 25 bp, probe
ttagggccctgatttgctgggcagt

SEQ ID NO: 297387 - DNA, 25 bp, probe
ttcggacccagatcatccggagctg

SEQ ID NO: 297388 - DNA, 25 bp, probe
ttcggacccagatcatccggagctg

SEQ ID NO: 297389 - DNA, 25 bp, probe
ttagagggccacaagctctggggcc

SEQ ID NO: 297390 - DNA, 25 bp, probe
ttagaagagtccaattctggccccc

SEQ ID NO: 297391 - DNA, 25 bp, probe
ttaacatagaccaaatatcccccaa

SEQ ID NO: 297392 - DNA, 25 bp, probe
ttgagaatcatggacaaaacctgct

SEQ ID NO: 297393 - DNA, 25 bp, probe
ttgaaatcttaaaaacctgcctcca

SEQ ID NO: 297394 - DNA, 25 bp, probe
ttgaaatcttaaaaacctgcctcca

SEQ ID NO: 297395 - DNA, 25 bp, probe
ttgaatcctttcagaagtccttcta

SEQ ID NO: 297396 - DNA, 25 bp, probe
ttgaactttctctgaagctcctttc

SEQ ID NO: 297397 - DNA, 25 bp, probe
ttgaactttctctgaagctcctttc

SEQ ID NO: 297398 - DNA, 25 bp, probe
ttaacattttagatactgccattat

SEQ ID NO: 297399 - DNA, 25 bp, probe
ttaagctaattaatattggtcatta

SEQ ID NO: 297400 - DNA, 25 bp, probe
ttacgtcttgtattttgttctgtga

SEQ ID NO: 297401 - DNA, 25 bp, probe
ttacaagttatactcttatttggaa

SEQ ID NO: 297402 - DNA, 25 bp, probe
ttacttggttactttaatgggcaat

SEQ ID NO: 297403 - DNA, 25 bp, probe
ttaggtgggttcctattaggtcaga

SEQ ID NO: 297404 - DNA, 25 bp, probe
ttagaggcctttcttgtatgtgtag

SEQ ID NO: 297405 - DNA, 25 bp, probe
ttaaccacttatctcccatatgaga

SEQ ID NO: 297406 - DNA, 25 bp, probe
ttaaccacttatctcccatatgaga

SEQ ID NO: 297407 - DNA, 25 bp, probe
ttaaacagcttgttttcccatggag

SEQ ID NO: 297408 - DNA, 25 bp, probe
ttaaacagcttgttttcccatggag

SEQ ID NO: 297409 - DNA, 25 bp, probe
ttaacaccttttgtgcaccttgcat

SEQ ID NO: 297410 - DNA, 25 bp, probe
ttaagccttatattaggcccctcta

SEQ ID NO: 297411 - DNA, 25 bp, probe
ttcaagccatagagttggggcctct

SEQ ID NO: 297412 - DNA, 25 bp, probe
ttccagcccggagtgctggaggccc

SEQ ID NO: 297413 - DNA, 25 bp, probe
ttcaaacgcggtgtcagaggccctg

SEQ ID NO: 297414 - DNA, 25 bp, probe
ttcaaacgcggtgtcagaggccctg

SEQ ID NO: 297415 - DNA, 25 bp, probe
ttaaacggagtcttgctatatcgcc

SEQ ID NO: 297416 - DNA, 25 bp, probe
ttagcatatcgtggttctgtaacaa

SEQ ID NO: 297417 - DNA, 25 bp, probe
ttagcatatcgtggttctgtaacaa

SEQ ID NO: 297418 - DNA, 25 bp, probe
ttagctacttgaaggcgtaactggt

SEQ ID NO: 297419 - DNA, 25 bp, probe
ttagctacttgaaggcgtaactggt

SEQ ID NO: 297420 - DNA, 25 bp, probe
ttctgctccttaaggttaacaattc

SEQ ID NO: 297421 - DNA, 25 bp, probe
ttcttttcttaggtatacaaatgtg

SEQ ID NO: 297422 - DNA, 25 bp, probe
ttctttcatgtcaggcgttaaactg

SEQ ID NO: 297423 - DNA, 25 bp, probe
ttgtctataatgagccgttaagtct

SEQ ID NO: 297424 - DNA, 25 bp, probe
ttgtctctagagcagggattaacct

SEQ ID NO: 297425 - DNA, 25 bp, probe
ttctgctctaagggggccagaccct

SEQ ID NO: 297426 - DNA, 25 bp, probe
ttcttgtaagaatcccaacacttta

SEQ ID NO: 297427 - DNA, 25 bp, probe
ttctttaggtaaccgagcatttatt

SEQ ID NO: 297428 - DNA, 25 bp, probe
ttctattcagggaacacgatggacc

SEQ ID NO: 297429 - DNA, 25 bp, probe
ttctattggggagacacaagcccga

SEQ ID NO: 297430 - DNA, 25 bp, probe
ttcaaggtgggagacgactgccggc

SEQ ID NO: 297431 - DNA, 25 bp, probe
ttcaaggcgggatgaagggctgcgc

SEQ ID NO: 297432 - DNA, 25 bp, probe
ttcttgggaggagtggtgggtgcag

SEQ ID NO: 297433 - DNA, 25 bp, probe
ttagcaattgggaatggctgggagg

SEQ ID NO: 297434 - DNA, 25 bp, probe
ttagcaatatgacattcttggtgac

SEQ ID NO: 297435 - DNA, 25 bp, probe
ttagaaatcggaggtgtggatgctc

SEQ ID NO: 297436 - DNA, 25 bp, probe
ttagtaacaggaactgaggcgatag

SEQ ID NO: 297437 - DNA, 25 bp, probe
ttcagttacaggagcgagagcgagc

SEQ ID NO: 297438 - DNA, 25 bp, probe
ttcagtgtgaccaggatgggcggga

SEQ ID NO: 297439 - DNA, 25 bp, probe
ttgaacagactgagcgtggaaggga

SEQ ID NO: 297440 - DNA, 25 bp, probe
ttagacagatgacggctgctcgaag

SEQ ID NO: 297441 - DNA, 25 bp, probe
ttagatggtgagggctctagaaacc

SEQ ID NO: 297442 - DNA, 25 bp, probe
ttaaattgagcggccgcgaattcct

SEQ ID NO: 297443 - DNA, 25 bp, probe
ttaacattcacagcccagaaccaca

SEQ ID NO: 297444 - DNA, 25 bp, probe
ttaatgcttcaagtcactaatcacc

SEQ ID NO: 297445 - DNA, 25 bp, probe
ttacatcgtcacggagtacatgagc

SEQ ID NO: 297446 - DNA, 25 bp, probe
ttacactgtccaaaggtctcaccca

SEQ ID NO: 297447 - DNA, 25 bp, probe
ttaactgttaaatgcgctacccacc

SEQ ID NO: 297448 - DNA, 25 bp, probe
ttcaagggctaattacctaaccagc

SEQ ID NO: 297449 - DNA, 25 bp, probe
ttgaaaacataacgacccaggccag

SEQ ID NO: 297450 - DNA, 25 bp, probe
ttaaaacataagccacaggccccag

SEQ ID NO: 297451 - DNA, 25 bp, probe
ttaaaacataagccacaggccccag

SEQ ID NO: 297452 - DNA, 25 bp, probe
ttaaaggcaaagtccagaacctgga

SEQ ID NO: 297453 - DNA, 25 bp, probe
ttgaaaatgcattagggaaaactta

SEQ ID NO: 297454 - DNA, 25 bp, probe
ttaaactgcaactggaaaggttgaa

SEQ ID NO: 297455 - DNA, 25 bp, probe
ttaacaccacaactggtgacaggtt

SEQ ID NO: 297456 - DNA, 25 bp, probe
ttagcaatgccttagctgggacgca

SEQ ID NO: 297457 - DNA, 25 bp, probe
ttagatgtcgtatccggagagagct

SEQ ID NO: 297458 - DNA, 25 bp, probe
ttaagctcagtatggcgggaagggc

SEQ ID NO: 297459 - DNA, 25 bp, probe
ttaagccagttatcgatgggatgga

SEQ ID NO: 297460 - DNA, 25 bp, probe
ttaaggagattatttgctgccgtgg

SEQ ID NO: 297461 - DNA, 25 bp, probe
ttgtaggaaaggttgtgccctggca

SEQ ID NO: 297462 - DNA, 25 bp, probe
ttctacgataagcattgtgacctgg

SEQ ID NO: 297463 - DNA, 25 bp, probe
ttcacccaagagcatcttggccctg

SEQ ID NO: 297464 - DNA, 25 bp, probe
ttaccactgacaggtcgtggccctg

SEQ ID NO: 297465 - DNA, 25 bp, probe
ttacgcaatagcgacgcgctggcgt

SEQ ID NO: 297466 - DNA, 25 bp, probe
ttaccaaatcccctcagcagagtgt

SEQ ID NO: 297467 - DNA, 25 bp, probe
ttaaaaatctctgtgcagaagtgtt

SEQ ID NO: 297468 - DNA, 25 bp, probe
ttaaaaacctgcctccaagatttca

SEQ ID NO: 297469 - DNA, 25 bp, probe
ttaccaaaagggtccattatttcat

SEQ ID NO: 297470 - DNA, 25 bp, probe
ttacacaaaggggatcataaagtta

SEQ ID NO: 297471 - DNA, 25 bp, probe
ttaacaaagcgggctttgccgtcaa

SEQ ID NO: 297472 - DNA, 25 bp, probe
ttcattcaaatgctcttttccctat

SEQ ID NO: 297473 - DNA, 25 bp, probe
ttaccagaatagtcttccaccagta

SEQ ID NO: 297474 - DNA, 25 bp, probe
ttaccaggtatgatctgacttcagt

SEQ ID NO: 297475 - DNA, 25 bp, probe
ttcaccaggtcattgattgcctcct

SEQ ID NO: 297476 - DNA, 25 bp, probe
ttcatccacagggatattgccgccc

SEQ ID NO: 297477 - DNA, 25 bp, probe
ttcatccagatgccaaatatgccaa

SEQ ID NO: 297478 - DNA, 25 bp, probe
ttagccaggtactctgctcatagaa

SEQ ID NO: 297479 - DNA, 25 bp, probe
ttacacagattatacagctctaagg

SEQ ID NO: 297480 - DNA, 25 bp, probe
ttaccgcatctatgtcacagctaag

SEQ ID NO: 297481 - DNA, 25 bp, probe
ttaccagctgcatattgcacccaca

SEQ ID NO: 297482 - DNA, 25 bp, probe
ttaccatgcagtcaggattctccac

SEQ ID NO: 297483 - DNA, 25 bp, probe
ttacctgcaggtggaatatttcatg

SEQ ID NO: 297484 - DNA, 25 bp, probe
ttatggtgggctgtgactcttcatc

SEQ ID NO: 297485 - DNA, 25 bp, probe
ttagcaatgtagtactgcctctata

SEQ ID NO: 297486 - DNA, 25 bp, probe
ttagcaatgtagtactgcctctata

SEQ ID NO: 297487 - DNA, 25 bp, probe
ttaacattgcagcaatcacctgcat

SEQ ID NO: 297488 - DNA, 25 bp, probe
ttaccgtgagtgacatagcctcatg

SEQ ID NO: 297489 - DNA, 25 bp, probe
ttagccaatgagaacatccccagac

SEQ ID NO: 297490 - DNA, 25 bp, probe
ttaggtctctgttgactggctgtgt

SEQ ID NO: 297491 - DNA, 25 bp, probe
ttaagtccttagctgcggtgctata

SEQ ID NO: 297492 - DNA, 25 bp, probe
ttaagagtcttacggcagggatcat

SEQ ID NO: 297493 - DNA, 25 bp, probe
ttaagagtcttacggcagggatcat

SEQ ID NO: 297494 - DNA, 25 bp, probe
ttaaattttatcagagagttgcaaa

SEQ ID NO: 297495 - DNA, 25 bp, probe
ttaaatttttccttagcattgtcta

SEQ ID NO: 297496 - DNA, 25 bp, probe
ttaactcttattgttgtgtttctga

SEQ ID NO: 297497 - DNA, 25 bp, probe
ttagagcacttaatggtctctgttt

SEQ ID NO: 297498 - DNA, 25 bp, probe
ttagtcacatatttgtttagttctg

SEQ ID NO: 297499 - DNA, 25 bp, probe
ttagtcacatatttgtttagttctg

SEQ ID NO: 297500 - DNA, 25 bp, probe
ttagctcgctcattttttaccatgt

SEQ ID NO: 297501 - DNA, 25 bp, probe
ttactggctctttgtgtgtctccag

SEQ ID NO: 297502 - DNA, 25 bp, probe
ttactatttcattgtgtgcacccac

SEQ ID NO: 297503 - DNA, 25 bp, probe
ttactttcatcaatgctaatccgat

SEQ ID NO: 297504 - DNA, 25 bp, probe
ttacttcatgactctgaaccgtaac

SEQ ID NO: 297505 - DNA, 25 bp, probe
ttagcctctgacagtgacctcagtc

SEQ ID NO: 297506 - DNA, 25 bp, probe
ttacctaacaagtactgctcattta

SEQ ID NO: 297507 - DNA, 25 bp, probe
ttacaataagggtactatatgtggg

SEQ ID NO: 297508 - DNA, 25 bp, probe
ttgacttggggttttacatgttggc

SEQ ID NO: 297509 - DNA, 25 bp, probe
ttacttagcggattcctgccttttg

SEQ ID NO: 297510 - DNA, 25 bp, probe
ttagttggatgccactacacctttt

SEQ ID NO: 297511 - DNA, 25 bp, probe
ttagttctgtgattttacacttttt

SEQ ID NO: 297512 - DNA, 25 bp, probe
ttagttctgtgattttacacttttt

SEQ ID NO: 297513 - DNA, 25 bp, probe
ttaattattgttatacacagcttta

SEQ ID NO: 297514 - DNA, 25 bp, probe
ttaattttcctacaatctgactcaa

SEQ ID NO: 297515 - DNA, 25 bp, probe
ttaatttgatcagaactgttaccaa

SEQ ID NO: 297516 - DNA, 25 bp, probe
ttacatttaaatttcttattgccaa

SEQ ID NO: 297517 - DNA, 25 bp, probe
ttaactgtaagttttgtgcttccaa

SEQ ID NO: 297518 - DNA, 25 bp, probe
ttaaattaaggcaaaggcaatcaaa

SEQ ID NO: 297519 - DNA, 25 bp, probe
ttaacatataagctgaactctatta

SEQ ID NO: 297520 - DNA, 25 bp, probe
ttaagagtcaatctgcaagccattt

SEQ ID NO: 297521 - DNA, 25 bp, probe
ttctagagtgaacttccacaccata

SEQ ID NO: 297522 - DNA, 25 bp, probe
ttagctgtgagaagttcccacctga

SEQ ID NO: 297523 - DNA, 25 bp, probe
ttacggcaatatcatcaccacacgc

SEQ ID NO: 297524 - DNA, 25 bp, probe
ttacggacattcaatcatcaccacg

SEQ ID NO: 297525 - DNA, 25 bp, probe
ttaagagaattccaccacactggcg

SEQ ID NO: 297526 - DNA, 25 bp, probe
ttaacagactcaaaccacatggacc

SEQ ID NO: 297527 - DNA, 25 bp, probe
ttgccaggaacagtaccctcaactc

SEQ ID NO: 297528 - DNA, 25 bp, probe
ttacagtaatgatagcctccaaggc

SEQ ID NO: 297529 - DNA, 25 bp, probe
ttacagtatgtggggacacccatgg

SEQ ID NO: 297530 - DNA, 25 bp, probe
ttacagatttcctgatcccgatgtt

SEQ ID NO: 297531 - DNA, 25 bp, probe
ttacatatttagcgcacccagagaa

SEQ ID NO: 297532 - DNA, 25 bp, probe
ttaatgcgttggcccacgtagcaaa

SEQ ID NO: 297533 - DNA, 25 bp, probe
ttaatgcgttggcccacgtagcaaa

SEQ ID NO: 297534 - DNA, 25 bp, probe
ttaagcgcattggtcctttggcatt

SEQ ID NO: 297535 - DNA, 25 bp, probe
ttaacctatgttgtatgtgaattat

SEQ ID NO: 297536 - DNA, 25 bp, probe
ttacctcttgctattttgttatata

SEQ ID NO: 297537 - DNA, 25 bp, probe
ttacctttcaagtttatctcaataa

SEQ ID NO: 297538 - DNA, 25 bp, probe
ttaactttcaatgtccatctttcaa

SEQ ID NO: 297539 - DNA, 25 bp, probe
ttaactttcaatgtccatctttcaa

SEQ ID NO: 297540 - DNA, 25 bp, probe
ttagagctttttgtcactatctgtc

SEQ ID NO: 297541 - DNA, 25 bp, probe
ttaagtctgttttgctctaatcctc

SEQ ID NO: 297542 - DNA, 25 bp, probe
ttacctcttactttctaaccatact

SEQ ID NO: 297543 - DNA, 25 bp, probe
ttaccctttcttcctcataggtagt

SEQ ID NO: 297544 - DNA, 25 bp, probe
ttacttttagttctataagtgagga

SEQ ID NO: 297545 - DNA, 25 bp, probe
ttacttttccttgatagggtgctgc

SEQ ID NO: 297546 - DNA, 25 bp, probe
ttaattcttgccaaccaggaggtgc

SEQ ID NO: 297547 - DNA, 25 bp, probe
ttaattattctcattcttaggtgca

SEQ ID NO: 297548 - DNA, 25 bp, probe
ttacattttactttttcctggctca

SEQ ID NO: 297549 - DNA, 25 bp, probe
ttagcattattagtttgttatgtgt

SEQ ID NO: 297550 - DNA, 25 bp, probe
ttagcattattagtttgttatgtgt

SEQ ID NO: 297551 - DNA, 25 bp, probe
ttaatcaattacttttttgtgagtt

SEQ ID NO: 297552 - DNA, 25 bp, probe
ttagaaactagtattctcttatttc

SEQ ID NO: 297553 - DNA, 25 bp, probe
ttagaagttagtatacaatattggg

SEQ ID NO: 297554 - DNA, 25 bp, probe
ttaacacctaggcctgcaaattctg

SEQ ID NO: 297555 - DNA, 25 bp, probe
ttaatcccaagacatcaatcaatct

SEQ ID NO: 297556 - DNA, 25 bp, probe
ttaaccaaaatgttactcacattaa

SEQ ID NO: 297557 - DNA, 25 bp, probe
ttagaccagatgaagactccagcca

SEQ ID NO: 297558 - DNA, 25 bp, probe
ttagaccagatgaagactccagcca

SEQ ID NO: 297559 - DNA, 25 bp, probe
ttagaaaacatttgcctcagccaca

SEQ ID NO: 297560 - DNA, 25 bp, probe
ttagttatcacaaggcctgcactca

SEQ ID NO: 297561 - DNA, 25 bp, probe
ttcagtcaacaccgagaccaccaaa

SEQ ID NO: 297562 - DNA, 25 bp, probe
ttagtaacatcagtcagtcctccac

SEQ ID NO: 297563 - DNA, 25 bp, probe
ttagtaacatcagtcagtcctccac

SEQ ID NO: 297564 - DNA, 25 bp, probe
ttagacaactcttcaggttccacat

SEQ ID NO: 297565 - DNA, 25 bp, probe
ttcaagaacctccaggtctagcctg

SEQ ID NO: 297566 - DNA, 25 bp, probe
ttcaagaacctccaggtctagcctg

SEQ ID NO: 297567 - DNA, 25 bp, probe
ttgcaatgggtcagcactttacctt

SEQ ID NO: 297568 - DNA, 25 bp, probe
ttgcaatgggtcagcactttacctt

SEQ ID NO: 297569 - DNA, 25 bp, probe
ttgctggggtcagctcgttactcaa

SEQ ID NO: 297570 - DNA, 25 bp, probe
ttgctggggtcagctcgttactcaa

SEQ ID NO: 297571 - DNA, 25 bp, probe
ttctcggcattaactcctgtttcaa

SEQ ID NO: 297572 - DNA, 25 bp, probe
ttcaaggcattatctcctggggcca

SEQ ID NO: 297573 - DNA, 25 bp, probe
ttaagccatggttgctcctagggtc

SEQ ID NO: 297574 - DNA, 25 bp, probe
ttagacggagtctcactctgtggcc

SEQ ID NO: 297575 - DNA, 25 bp, probe
ttctacgaggacttcctcatctggc

SEQ ID NO: 297576 - DNA, 25 bp, probe
ttctacgcaggagccctcctgctgg

SEQ ID NO: 297577 - DNA, 25 bp, probe
ttagagcacggagtccgtccagttg

SEQ ID NO: 297578 - DNA, 25 bp, probe
ttacaggcgcgagccaccgcgcctg

SEQ ID NO: 297579 - DNA, 25 bp, probe
ttactaggcagggcccatggtcctg

SEQ ID NO: 297580 - DNA, 25 bp, probe
ttacaccacagtaaccaggtcctgc

SEQ ID NO: 297581 - DNA, 25 bp, probe
ttagcacccctggccaaggtcatcc

SEQ ID NO: 297582 - DNA, 25 bp, probe
ttagcacccctggccaaggtcatcc

SEQ ID NO: 297583 - DNA, 25 bp, probe
ttagaccagcctcctgaaagaaaca

SEQ ID NO: 297584 - DNA, 25 bp, probe
ttagaccaccctcacataatcaaac

SEQ ID NO: 297585 - DNA, 25 bp, probe
ttaaccccctagaaagacagaagct

SEQ ID NO: 297586 - DNA, 25 bp, probe
ttacccacccattaaatgggaacat

SEQ ID NO: 297587 - DNA, 25 bp, probe
ttacccaccagattacaatcctgaa

SEQ ID NO: 297588 - DNA, 25 bp, probe
ttacccaccagagacagtacagaat

SEQ ID NO: 297589 - DNA, 25 bp, probe
ttacttccctgggatccccagagtt

SEQ ID NO: 297590 - DNA, 25 bp, probe
ttacttcctttttatctccaggtat

SEQ ID NO: 297591 - DNA, 25 bp, probe
ttagttttctttgtcttggccattt

SEQ ID NO: 297592 - DNA, 25 bp, probe
ttagtttttactttctgttgccaca

SEQ ID NO: 297593 - DNA, 25 bp, probe
ttagttatttgattccctgtctgtc

SEQ ID NO: 297594 - DNA, 25 bp, probe
ttaattcagttgttagtgtgtctta

SEQ ID NO: 297595 - DNA, 25 bp, probe
ttagatgtggtatttattttcttag

SEQ ID NO: 297596 - DNA, 25 bp, probe
ttagatactgccattattgtgattc

SEQ ID NO: 297597 - DNA, 25 bp, probe
ttagattcccttgaagatgtgtccc

SEQ ID NO: 297598 - DNA, 25 bp, probe
ttagttcccattaaaatatgcattt

SEQ ID NO: 297599 - DNA, 25 bp, probe
ttaacttccatttagctatagcttt

SEQ ID NO: 297600 - DNA, 25 bp, probe
ttaaccccgtcatttacgcatactt

SEQ ID NO: 297601 - DNA, 25 bp, probe
ttcaataccaggaagttatgccaac

SEQ ID NO: 297602 - DNA, 25 bp, probe
ttaaagctcaaggtgcatttcaaac

SEQ ID NO: 297603 - DNA, 25 bp, probe
ttagaactcaaggttttcattgaca

SEQ ID NO: 297604 - DNA, 25 bp, probe
ttagacactggaggtttttaacaga

SEQ ID NO: 297605 - DNA, 25 bp, probe
ttaccctgaactgcgctttgaagaa

SEQ ID NO: 297606 - DNA, 25 bp, probe
ttagcccttcctccaattataagag

SEQ ID NO: 297607 - DNA, 25 bp, probe
ttagcccttcctccaattataagag

SEQ ID NO: 297608 - DNA, 25 bp, probe
ttaccctgtgcctcatatttcaata

SEQ ID NO: 297609 - DNA, 25 bp, probe
ttagccttggaggttgactgtgcaa

SEQ ID NO: 297610 - DNA, 25 bp, probe
ttagcagcttccagattgacgacaa

SEQ ID NO: 297611 - DNA, 25 bp, probe
ttacatctttaatttggcagaaatt

SEQ ID NO: 297612 - DNA, 25 bp, probe
ttactttgtatctcatgaccaaatg

SEQ ID NO: 297613 - DNA, 25 bp, probe
ttagtattgacactctctaccaaga

SEQ ID NO: 297614 - DNA, 25 bp, probe
ttaatttataattctcagtgcaaga

SEQ ID NO: 297615 - DNA, 25 bp, probe
ttaaatgttcaaatgtaagcaagaa

SEQ ID NO: 297616 - DNA, 25 bp, probe
ttaatattattaagtccagagagaa

SEQ ID NO: 297617 - DNA, 25 bp, probe
ttacatactcaaaaccaagatagaa

SEQ ID NO: 297618 - DNA, 25 bp, probe
ttacatactcaaaaccaagatagaa

SEQ ID NO: 297619 - DNA, 25 bp, probe
ttaccccaaaagccgtgatgtgcaa

SEQ ID NO: 297620 - DNA, 25 bp, probe
ttaccctcaacagtgggatgatgtg

SEQ ID NO: 297621 - DNA, 25 bp, probe
ttaactgtcaagcctgtggatgatt

SEQ ID NO: 297622 - DNA, 25 bp, probe
ttagccattttgccttggaatcatg

SEQ ID NO: 297623 - DNA, 25 bp, probe
ttagcacctgtttctgggtcatcag

SEQ ID NO: 297624 - DNA, 25 bp, probe
ttagacctgacatctggctatcaca

SEQ ID NO: 297625 - DNA, 25 bp, probe
ttaaagtgcctctggctgacatgcc

SEQ ID NO: 297626 - DNA, 25 bp, probe
ttaaagtgcctctggctgacatgcc

SEQ ID NO: 297627 - DNA, 25 bp, probe
ttaaagtgcctctggctgacatgcc

SEQ ID NO: 297628 - DNA, 25 bp, probe
ttcaaagtgccctgtgcaggctgca

SEQ ID NO: 297629 - DNA, 25 bp, probe
ttagatagctacttggtgggtgatg

SEQ ID NO: 297630 - DNA, 25 bp, probe
ttagaagccatcgttctgtggctgg

SEQ ID NO: 297631 - DNA, 25 bp, probe
ttagctgggcatggttgcgtgcgcc

SEQ ID NO: 297632 - DNA, 25 bp, probe
ttagccaggcatggtggcaggtgcc

SEQ ID NO: 297633 - DNA, 25 bp, probe
ttagccaggcatggtgggacacacc

SEQ ID NO: 297634 - DNA, 25 bp, probe
ttagcacaggtgcagcagtgatcaa

SEQ ID NO: 297635 - DNA, 25 bp, probe
ttagctgcagtatcaatgtggcata

SEQ ID NO: 297636 - DNA, 25 bp, probe
ttactgcaatgctcgctggagaatt

SEQ ID NO: 297637 - DNA, 25 bp, probe
ttcaatgcactggaactggatgaca

SEQ ID NO: 297638 - DNA, 25 bp, probe
ttaacactcaattgctagagagcga

SEQ ID NO: 297639 - DNA, 25 bp, probe
ttaactccaattgatgagggacatc

SEQ ID NO: 297640 - DNA, 25 bp, probe
ttacagtccaatggtatgctggaga

SEQ ID NO: 297641 - DNA, 25 bp, probe
ttaagtacagaaggtgctaaagttg

SEQ ID NO: 297642 - DNA, 25 bp, probe
ttcataaagagaccggccagattgt

SEQ ID NO: 297643 - DNA, 25 bp, probe
ttcattatactacctggccagaatt

SEQ ID NO: 297644 - DNA, 25 bp, probe
ttcagtaagtgccttggaacaatat

SEQ ID NO: 297645 - DNA, 25 bp, probe
ttgggcgagtgccttatccaagaat

SEQ ID NO: 297646 - DNA, 25 bp, probe
ttctcgtggctggttaccaaaaagt

SEQ ID NO: 297647 - DNA, 25 bp, probe
ttactgtgtgctgtaactctccaag

SEQ ID NO: 297648 - DNA, 25 bp, probe
ttagctgctgtttttagactccaag

SEQ ID NO: 297649 - DNA, 25 bp, probe
ttagctccatttatagcacctcaga

SEQ ID NO: 297650 - DNA, 25 bp, probe
ttactatcaattatcagagcccatg

SEQ ID NO: 297651 - DNA, 25 bp, probe
ttactatcttctatgctctccagta

SEQ ID NO: 297652 - DNA, 25 bp, probe
ttacatacttgtccctctaagtcat

SEQ ID NO: 297653 - DNA, 25 bp, probe
ttagatgacatttagccctaagatt

SEQ ID NO: 297654 - DNA, 25 bp, probe
ttcgaaaactcagcaatggcagatt

SEQ ID NO: 297655 - DNA, 25 bp, probe
ttaagaacaccagcttgcaggattt

SEQ ID NO: 297656 - DNA, 25 bp, probe
ttaaataccactgcttgctgctttt

SEQ ID NO: 297657 - DNA, 25 bp, probe
ttaaaagccactgttacatttcaaa

SEQ ID NO: 297658 - DNA, 25 bp, probe
ttaaactccattgttcagggtaaag

SEQ ID NO: 297659 - DNA, 25 bp, probe
ttccaggtccttgcgactgtggtaa

SEQ ID NO: 297660 - DNA, 25 bp, probe
ttcaacgtcccagcagtcttggtaa

SEQ ID NO: 297661 - DNA, 25 bp, probe
ttagacattcctcgtcagtattagg

SEQ ID NO: 297662 - DNA, 25 bp, probe
ttagagcataccagtactcagtata

SEQ ID NO: 297663 - DNA, 25 bp, probe
ttaactacctttatcatgtgaacct

SEQ ID NO: 297664 - DNA, 25 bp, probe
ttagcatccaccaattttcactgca

SEQ ID NO: 297665 - DNA, 25 bp, probe
ttcactacaccatgtttgagctcag

SEQ ID NO: 297666 - DNA, 25 bp, probe
ttcactgcaccctggatttgcatac

SEQ ID NO: 297667 - DNA, 25 bp, probe
ttcaggcaccgagaacctagcacgt

SEQ ID NO: 297668 - DNA, 25 bp, probe
ttcaggctacgtgaacttggaagca

SEQ ID NO: 297669 - DNA, 25 bp, probe
ttcaggctacgtgaacttggaagca

SEQ ID NO: 297670 - DNA, 25 bp, probe
ttcggcattcgttatacggaagatg

SEQ ID NO: 297671 - DNA, 25 bp, probe
ttcagcgtccagttaactgcagaag

SEQ ID NO: 297672 - DNA, 25 bp, probe
ttacgagcagcatatccatctagaa

SEQ ID NO: 297673 - DNA, 25 bp, probe
ttagcagaggcatttcatatcagtg

SEQ ID NO: 297674 - DNA, 25 bp, probe
ttaacaccacctgatcagctggtta

SEQ ID NO: 297675 - DNA, 25 bp, probe
ttaacactacactactcacaatggt

SEQ ID NO: 297676 - DNA, 25 bp, probe
ttcaatatgctctaaacgacgaggt

SEQ ID NO: 297677 - DNA, 25 bp, probe
ttcaatatgctctaaacgacgaggt

SEQ ID NO: 297678 - DNA, 25 bp, probe
ttacattgcctgccaaggaccactg

SEQ ID NO: 297679 - DNA, 25 bp, probe
ttaatcccatgtcatgcgaccctag

SEQ ID NO: 297680 - DNA, 25 bp, probe
ttaacaccaatgctgaaccccatga

SEQ ID NO: 297681 - DNA, 25 bp, probe
ttaaagactggcagcaacaccacta

SEQ ID NO: 297682 - DNA, 25 bp, probe
ttaaaatcatgacagcagaaggact

SEQ ID NO: 297683 - DNA, 25 bp, probe
ttacaaattgatcctgctgacagga

SEQ ID NO: 297684 - DNA, 25 bp, probe
ttactactatcaactgtcatcggca

SEQ ID NO: 297685 - DNA, 25 bp, probe
ttactggatccaagcgtctcgagga

SEQ ID NO: 297686 - DNA, 25 bp, probe
ttactggatccaagcgtctcgagga

SEQ ID NO: 297687 - DNA, 25 bp, probe
ttactggatccaagcgtctcgagga

SEQ ID NO: 297688 - DNA, 25 bp, probe
ttactggcatggtatcattcctaga

SEQ ID NO: 297689 - DNA, 25 bp, probe
ttactgggatgattatattgcttga

SEQ ID NO: 297690 - DNA, 25 bp, probe
ttacagtggcataccattgtgttga

SEQ ID NO: 297691 - DNA, 25 bp, probe
ttaatgggctggccaggctgtgtca

SEQ ID NO: 297692 - DNA, 25 bp, probe
ttagagaggtagcgagctgctctgc

SEQ ID NO: 297693 - DNA, 25 bp, probe
ttcaaaagttgacggatgtcgcaga

SEQ ID NO: 297694 - DNA, 25 bp, probe
ttacaacctgtacgctgtgtccaat

SEQ ID NO: 297695 - DNA, 25 bp, probe
ttacaaccttacctagatatctgct

SEQ ID NO: 297696 - DNA, 25 bp, probe
ttacttggttcccataatagcttcc

SEQ ID NO: 297697 - DNA, 25 bp, probe
ttactgccgattgcttattacttaa

SEQ ID NO: 297698 - DNA, 25 bp, probe
ttactccgtaccttactgagatctg

SEQ ID NO: 297699 - DNA, 25 bp, probe
ttacctcatagaccttcaaggacag

SEQ ID NO: 297700 - DNA, 25 bp, probe
ttaaccatgatgtcacttcaggtga

SEQ ID NO: 297701 - DNA, 25 bp, probe
ttacagctacagtcacatccagcct

SEQ ID NO: 297702 - DNA, 25 bp, probe
ttaccatagcaattcttcagctgca

SEQ ID NO: 297703 - DNA, 25 bp, probe
ttaccatagcaattcttcagctgca

SEQ ID NO: 297704 - DNA, 25 bp, probe
ttagcctactcttctgtcagtggct

SEQ ID NO: 297705 - DNA, 25 bp, probe
ttagaatcctgagctgtggtggctt

SEQ ID NO: 297706 - DNA, 25 bp, probe
ttaacatgccacgctgtggtcacca

SEQ ID NO: 297707 - DNA, 25 bp, probe
ttaagcaatcactcattaccaccaa

SEQ ID NO: 297708 - DNA, 25 bp, probe
ttcaatcaacactttttcagactaa

SEQ ID NO: 297709 - DNA, 25 bp, probe
ttcaatcaactctggcttcatacaa

SEQ ID NO: 297710 - DNA, 25 bp, probe
ttaataaccaagttgctgctgaact

SEQ ID NO: 297711 - DNA, 25 bp, probe
ttacttacaaagaggtgctcagctt

SEQ ID NO: 297712 - DNA, 25 bp, probe
ttaattatccaaacagtgggcagct

SEQ ID NO: 297713 - DNA, 25 bp, probe
ttagcattattaaagagtcctcact

SEQ ID NO: 297714 - DNA, 25 bp, probe
ttagcattattaaagagtcctcact

SEQ ID NO: 297715 - DNA, 25 bp, probe
ttagcttttagcctggctgtcacct

SEQ ID NO: 297716 - DNA, 25 bp, probe
ttagactatttcccacatgttctct

SEQ ID NO: 297717 - DNA, 25 bp, probe
ttaccatttattacatcgttcatcc

SEQ ID NO: 297718 - DNA, 25 bp, probe
ttaccttagctaactaactctcctc

SEQ ID NO: 297719 - DNA, 25 bp, probe
ttacctctcagaacgtaagtttgtt

SEQ ID NO: 297720 - DNA, 25 bp, probe
ttaccctgcagtttgtgaatttttg

SEQ ID NO: 297721 - DNA, 25 bp, probe
ttaccactagtgcatgtgaccattt

SEQ ID NO: 297722 - DNA, 25 bp, probe
ttagctcagatacttgattgcaact

SEQ ID NO: 297723 - DNA, 25 bp, probe
ttacatgccataattgatcctaatc

SEQ ID NO: 297724 - DNA, 25 bp, probe
ttactgcagcagtctgtgaactaaa

SEQ ID NO: 297725 - DNA, 25 bp, probe
ttacagctcagactattacaataac

SEQ ID NO: 297726 - DNA, 25 bp, probe
ttcaaatcacagtcatattaaaagc

SEQ ID NO: 297727 - DNA, 25 bp, probe
ttcaaaacgcgtttaagaagatcat

SEQ ID NO: 297728 - DNA, 25 bp, probe
ttcaagtaagcggcaacaagggtcc

SEQ ID NO: 297729 - DNA, 25 bp, probe
ttcaaggcctgggctacactgtggt

SEQ ID NO: 297730 - DNA, 25 bp, probe
ttcaagacgctggctgatgtactgg

SEQ ID NO: 297731 - DNA, 25 bp, probe
ttaacatttgtcaatgaacatgggg

SEQ ID NO: 297732 - DNA, 25 bp, probe
ttaacatttgtcaatgaacatgggg

SEQ ID NO: 297733 - DNA, 25 bp, probe
ttcaatttttctgtgagttgggttg

SEQ ID NO: 297734 - DNA, 25 bp, probe
ttaatttcgattgtgtcttcagttt

SEQ ID NO: 297735 - DNA, 25 bp, probe
ttaaactgtcgtgtgtttctgtttt

SEQ ID NO: 297736 - DNA, 25 bp, probe
ttaataggtttggtgcttatcttct

SEQ ID NO: 297737 - DNA, 25 bp, probe
ttgaatactatcttgggtttaccgt

SEQ ID NO: 297738 - DNA, 25 bp, probe
ttgaatactatcttgggtttaccgt

SEQ ID NO: 297739 - DNA, 25 bp, probe
ttgaatactatcttgggtttaccgt

SEQ ID NO: 297740 - DNA, 25 bp, probe
ttgaatactatcttgggtttaccgt

SEQ ID NO: 297741 - DNA, 25 bp, probe
ttaaactatcatagccctgcttact

SEQ ID NO: 297742 - DNA, 25 bp, probe
ttactagattctagcaccgctgtcc

SEQ ID NO: 297743 - DNA, 25 bp, probe
ttacttcatgactgccacgcattta

SEQ ID NO: 297744 - DNA, 25 bp, probe
ttacttcatagcttggatcacattc

SEQ ID NO: 297745 - DNA, 25 bp, probe
ttgagaccatcatagagatcgattc

SEQ ID NO: 297746 - DNA, 25 bp, probe
ttcaatgctgtctggagtccttctg

SEQ ID NO: 297747 - DNA, 25 bp, probe
ttcaggggactggctgtccttctga

SEQ ID NO: 297748 - DNA, 25 bp, probe
ttagcggagtgcgcatggcctgttg

SEQ ID NO: 297749 - DNA, 25 bp, probe
ttaattgagagccctgggtcctgcc

SEQ ID NO: 297750 - DNA, 25 bp, probe
ttaattgagagccctgggtcctgcc

SEQ ID NO: 297751 - DNA, 25 bp, probe
ttaactgaagaagggatgtccgcta

SEQ ID NO: 297752 - DNA, 25 bp, probe
ttacttgacaacaaggattcctgct

SEQ ID NO: 297753 - DNA, 25 bp, probe
ttacttgacaacaaggattcctgct

SEQ ID NO: 297754 - DNA, 25 bp, probe
ttagctatatcatttgaggttttct

SEQ ID NO: 297755 - DNA, 25 bp, probe
ttagctcattacatgcagtcttata

SEQ ID NO: 297756 - DNA, 25 bp, probe
ttactatcataattcagcacttaac

SEQ ID NO: 297757 - DNA, 25 bp, probe
ttcaacctagaaacctttatccctg

SEQ ID NO: 297758 - DNA, 25 bp, probe
ttaaaacgatcaactttcctcgcct

SEQ ID NO: 297759 - DNA, 25 bp, probe
ttaaaacgatcaactttcctcgcct

SEQ ID NO: 297760 - DNA, 25 bp, probe
ttcaaacaccaattgctttacctga

SEQ ID NO: 297761 - DNA, 25 bp, probe
ttaaaaagcatttgtcttaccttca

SEQ ID NO: 297762 - DNA, 25 bp, probe
ttaaaaagcatttgtcttaccttca

SEQ ID NO: 297763 - DNA, 25 bp, probe
ttaaccacactttgatttgggttca

SEQ ID NO: 297764 - DNA, 25 bp, probe
ttaaccccattgtatgtttgtggaa

SEQ ID NO: 297765 - DNA, 25 bp, probe
ttaaccgctatagagtattccataa

SEQ ID NO: 297766 - DNA, 25 bp, probe
ttaaccgctatagagtattccataa

SEQ ID NO: 297767 - DNA, 25 bp, probe
ttctcacccttagaagctctactaa

SEQ ID NO: 297768 - DNA, 25 bp, probe
ttcatccttttcataaacattctaa

SEQ ID NO: 297769 - DNA, 25 bp, probe
ttaccatcttaaagaaacatctctt

SEQ ID NO: 297770 - DNA, 25 bp, probe
ttaactattaactacattcaccttg

SEQ ID NO: 297771 - DNA, 25 bp, probe
ttaacaacaataacactgtctcctt

SEQ ID NO: 297772 - DNA, 25 bp, probe
ttaaggaaagatatgcttgctttct

SEQ ID NO: 297773 - DNA, 25 bp, probe
ttcaggggacgattctgtgttttct

SEQ ID NO: 297774 - DNA, 25 bp, probe
ttcagggatcgccaggcgttttctg

SEQ ID NO: 297775 - DNA, 25 bp, probe
ttcgaaagcctggaggctattttgc

SEQ ID NO: 297776 - DNA, 25 bp, probe
ttcaagaacttcaacctctttctcg

SEQ ID NO: 297777 - DNA, 25 bp, probe
ttaatattctacatctcttgtcctc

SEQ ID NO: 297778 - DNA, 25 bp, probe
ttaacactctagctattcttcgtcg

SEQ ID NO: 297779 - DNA, 25 bp, probe
ttaagatctctaatctgttttgagt

SEQ ID NO: 297780 - DNA, 25 bp, probe
ttacatatcccaagccctttagggc

SEQ ID NO: 297781 - DNA, 25 bp, probe
ttagcattcactaagccctacatag

SEQ ID NO: 297782 - DNA, 25 bp, probe
ttagcttgcaccttgtcacatagag

SEQ ID NO: 297783 - DNA, 25 bp, probe
ttgagtctgccattcgtagctgaat

SEQ ID NO: 297784 - DNA, 25 bp, probe
ttcagtcggcaacgcaagcgcaagt

SEQ ID NO: 297785 - DNA, 25 bp, probe
ttcaggcgaattccataccgttact

SEQ ID NO: 297786 - DNA, 25 bp, probe
ttcaggttgttgcaacacaggtcct

SEQ ID NO: 297787 - DNA, 25 bp, probe
ttccagatttttcactagcgtacat

SEQ ID NO: 297788 - DNA, 25 bp, probe
ttcaagtttcagcaactacctacaa

SEQ ID NO: 297789 - DNA, 25 bp, probe
ttctaatatccgaaactaaatactt

SEQ ID NO: 297790 - DNA, 25 bp, probe
ttaaaacagcaaagactaagtcagc

SEQ ID NO: 297791 - DNA, 25 bp, probe
ttaagagaacgaagaccacagcaag

SEQ ID NO: 297792 - DNA, 25 bp, probe
ttactaaaagaaccaccagatctgc

SEQ ID NO: 297793 - DNA, 25 bp, probe
ttaataagaatattccccacaatcc

SEQ ID NO: 297794 - DNA, 25 bp, probe
ttacaacacaattgcatcccaaata

SEQ ID NO: 297795 - DNA, 25 bp, probe
ttaaagacacatccacggacctgag

SEQ ID NO: 297796 - DNA, 25 bp, probe
ttaaatgacagtgaattgacccatg

SEQ ID NO: 297797 - DNA, 25 bp, probe
ttagccgggatggtcttgatctcct

SEQ ID NO: 297798 - DNA, 25 bp, probe
ttcaagcaggtacttctctgtgcat

SEQ ID NO: 297799 - DNA, 25 bp, probe
ttcacacatgccacctttgtgctta

SEQ ID NO: 297800 - DNA, 25 bp, probe
ttaccatgcatttctcgttctttac

SEQ ID NO: 297801 - DNA, 25 bp, probe
ttacctgttactctacattaaaaat

SEQ ID NO: 297802 - DNA, 25 bp, probe
ttacctgttactctacattaaaaat

SEQ ID NO: 297803 - DNA, 25 bp, probe
ttaactatttcacatactgtaacaa

SEQ ID NO: 297804 - DNA, 25 bp, probe
ttcaactttgtcccacctgggagaa

SEQ ID NO: 297805 - DNA, 25 bp, probe
ttcaactttgtcccacctgggagaa

SEQ ID NO: 297806 - DNA, 25 bp, probe
ttccgctttggaactgtccgagaaa

SEQ ID NO: 297807 - DNA, 25 bp, probe
ttctagttgtggtttgtccaaactc

SEQ ID NO: 297808 - DNA, 25 bp, probe
ttctgggtggaggctttccgactcc

SEQ ID NO: 297809 - DNA, 25 bp, probe
ttctgggggggtgatctcagagccg

SEQ ID NO: 297810 - DNA, 25 bp, probe
ttctgggggggtgatctcagagccg

SEQ ID NO: 297811 - DNA, 25 bp, probe
ttcaggcgtggatgccgcatatgaa

SEQ ID NO: 297812 - DNA, 25 bp, probe
ttcaaggctggcttaagtataaaat

SEQ ID NO: 297813 - DNA, 25 bp, probe
ttaagggctttatgtgaactatgat

SEQ ID NO: 297814 - DNA, 25 bp, probe
ttaaaggctttctatgtagtgcata

SEQ ID NO: 297815 - DNA, 25 bp, probe
ttacatcagatgtttctttgcagtg

SEQ ID NO: 297816 - DNA, 25 bp, probe
ttaacagcatgacttcttacagagc

SEQ ID NO: 297817 - DNA, 25 bp, probe
ttaacagcatgacttcttacagagc

SEQ ID NO: 297818 - DNA, 25 bp, probe
ttaacagatgatccatttgaacagt

SEQ ID NO: 297819 - DNA, 25 bp, probe
ttcaaaatatacattcaaacttaaa

SEQ ID NO: 297820 - DNA, 25 bp, probe
ttaatatgttagcttgccattttaa

SEQ ID NO: 297821 - DNA, 25 bp, probe
ttaatgcaggattcgttcacgttct

SEQ ID NO: 297822 - DNA, 25 bp, probe
ttaatgcaggattcgttcacgttct

SEQ ID NO: 297823 - DNA, 25 bp, probe
ttaatgcagacactggaaaagcttt

SEQ ID NO: 297824 - DNA, 25 bp, probe
ttaaatgacctgcatcaagtcttct

SEQ ID NO: 297825 - DNA, 25 bp, probe
ttgaactacctgctaattcttgccg

SEQ ID NO: 297826 - DNA, 25 bp, probe
ttgaactacctgctaattcttgccg

SEQ ID NO: 297827 - DNA, 25 bp, probe
ttaattaactgggatgatctcatta

SEQ ID NO: 297828 - DNA, 25 bp, probe
ttaattcttgcttcctatgctagta

SEQ ID NO: 297829 - DNA, 25 bp, probe
ttaattttcgcattgttgacagata

SEQ ID NO: 297830 - DNA, 25 bp, probe
ttaactgcttcctttatgactatgc

SEQ ID NO: 297831 - DNA, 25 bp, probe
ttacactgctatgctccagaacttc

SEQ ID NO: 297832 - DNA, 25 bp, probe
ttaattgattcctcgcgacatcttc

SEQ ID NO: 297833 - DNA, 25 bp, probe
ttaactgtcccagcgagatttctcc

SEQ ID NO: 297834 - DNA, 25 bp, probe
ttaagttcccagaccaatatacatt

SEQ ID NO: 297835 - DNA, 25 bp, probe
ttactttctccccaacataattatt

SEQ ID NO: 297836 - DNA, 25 bp, probe
ttactttctaaccatactcatcacc

SEQ ID NO: 297837 - DNA, 25 bp, probe
ttacattactattccataactccag

SEQ ID NO: 297838 - DNA, 25 bp, probe
ttacattactattccataactccag

SEQ ID NO: 297839 - DNA, 25 bp, probe
ttaccttaatatgcaagactctcaa

SEQ ID NO: 297840 - DNA, 25 bp, probe
ttacctaaatgttcactgacacaaa

SEQ ID NO: 297841 - DNA, 25 bp, probe
ttacctctttggcagtacagataac

SEQ ID NO: 297842 - DNA, 25 bp, probe
ttaccccatatacatgtgactaata

SEQ ID NO: 297843 - DNA, 25 bp, probe
ttaccccatatacatgtgactaata

SEQ ID NO: 297844 - DNA, 25 bp, probe
ttacctccacatgctgatgatgact

SEQ ID NO: 297845 - DNA, 25 bp, probe
ttacctggacatgtatcagatgctg

SEQ ID NO: 297846 - DNA, 25 bp, probe
ttcacactgcagagactaatgttgg

SEQ ID NO: 297847 - DNA, 25 bp, probe
ttaactgagggagagcaagatgagg

SEQ ID NO: 297848 - DNA, 25 bp, probe
ttcaaagacgaggtaaggtgcaagt

SEQ ID NO: 297849 - DNA, 25 bp, probe
ttcacaaaggagctaagccatgcaa

SEQ ID NO: 297850 - DNA, 25 bp, probe
ttcacaaaggagctaagccatgcaa

SEQ ID NO: 297851 - DNA, 25 bp, probe
ttcaacagggagctgagggactgct

SEQ ID NO: 297852 - DNA, 25 bp, probe
ttactcatcgggcccagggacattg

SEQ ID NO: 297853 - DNA, 25 bp, probe
ttaccccgacacaaggagctcttgt

SEQ ID NO: 297854 - DNA, 25 bp, probe
ttcttcccgacccagaaagcatggg

SEQ ID NO: 297855 - DNA, 25 bp, probe
ttgttcctggggctggaatgctggg

SEQ ID NO: 297856 - DNA, 25 bp, probe
ttgttctatggcacgggctttgggg

SEQ ID NO: 297857 - DNA, 25 bp, probe
ttactcagatactcgtggctttgcg

SEQ ID NO: 297858 - DNA, 25 bp, probe
ttacattgtgacacggcctttggcc

SEQ ID NO: 297859 - DNA, 25 bp, probe
ttacaataaaccctccttggtgcct

SEQ ID NO: 297860 - DNA, 25 bp, probe
ttaaaaagcaacccccatgtatgcc

SEQ ID NO: 297861 - DNA, 25 bp, probe
ttcataaaactactggaccagttac

SEQ ID NO: 297862 - DNA, 25 bp, probe
ttctgaaggactataccgagtatca

SEQ ID NO: 297863 - DNA, 25 bp, probe
ttctgaggagtctctttcagtttca

SEQ ID NO: 297864 - DNA, 25 bp, probe
ttctgaggagtctctttcagtttca

SEQ ID NO: 297865 - DNA, 25 bp, probe
ttcattaagatctctaatctgtttt

SEQ ID NO: 297866 - DNA, 25 bp, probe
ttctgctaatatacctagattttta

SEQ ID NO: 297867 - DNA, 25 bp, probe
ttctctcaaccctttcatttattgc

SEQ ID NO: 297868 - DNA, 25 bp, probe
ttcaccaaaacaacttgttattgaa

SEQ ID NO: 297869 - DNA, 25 bp, probe
ttcacccaaaccatgcttatttgtg

SEQ ID NO: 297870 - DNA, 25 bp, probe
ttcaccctgtaccagtttttcctgg

SEQ ID NO: 297871 - DNA, 25 bp, probe
ttcaccctgtaccagtttttcctgg

SEQ ID NO: 297872 - DNA, 25 bp, probe
ttcacctttgaccgtacaggtacag

SEQ ID NO: 297873 - DNA, 25 bp, probe
ttactgctcttattgttaaggataa

SEQ ID NO: 297874 - DNA, 25 bp, probe
ttaccttgtattttcatctgtgaga

SEQ ID NO: 297875 - DNA, 25 bp, probe
ttacctgcttgagctttctgtgcat

SEQ ID NO: 297876 - DNA, 25 bp, probe
ttaccatgatgtcgtggttgttgat

SEQ ID NO: 297877 - DNA, 25 bp, probe
ttacacgtgtgcttggttttgcctt

SEQ ID NO: 297878 - DNA, 25 bp, probe
ttcactcgctgggggtgtttgtttg

SEQ ID NO: 297879 - DNA, 25 bp, probe
ttgagtccgggcggagggtggcttc

SEQ ID NO: 297880 - DNA, 25 bp, probe
ttgagtccgggcggagggtggcttc

SEQ ID NO: 297881 - DNA, 25 bp, probe
ttgactgacgagccgaggggtggcc

SEQ ID NO: 297882 - DNA, 25 bp, probe
ttgtctgaaggggaaaggcattctt

SEQ ID NO: 297883 - DNA, 25 bp, probe
ttcttggtgtgtgggagaagtttta

SEQ ID NO: 297884 - DNA, 25 bp, probe
ttcacttgaatgagaaacgtgttta

SEQ ID NO: 297885 - DNA, 25 bp, probe
ttactaataatttcaaggtgtgtgt

SEQ ID NO: 297886 - DNA, 25 bp, probe
ttactagatctcatacaaggcttat

SEQ ID NO: 297887 - DNA, 25 bp, probe
ttcactaagccctacataggattct

SEQ ID NO: 297888 - DNA, 25 bp, probe
ttcactgaagtgctaccagtggttg

SEQ ID NO: 297889 - DNA, 25 bp, probe
ttacgagatgtggctcttcgttgtt

SEQ ID NO: 297890 - DNA, 25 bp, probe
ttacgatgagcgccctattttgttc

SEQ ID NO: 297891 - DNA, 25 bp, probe
ttacgatgagcgccctattttgttc

SEQ ID NO: 297892 - DNA, 25 bp, probe
ttactcaagccaccacattttgtaa

SEQ ID NO: 297893 - DNA, 25 bp, probe
ttaccggtcatcgctttattgacat

SEQ ID NO: 297894 - DNA, 25 bp, probe
ttacgtgggcattgtctttttagat

SEQ ID NO: 297895 - DNA, 25 bp, probe
ttacgtgggcattgtctttttagat

SEQ ID NO: 297896 - DNA, 25 bp, probe
ttacctggagtaatgcttttcaaga

SEQ ID NO: 297897 - DNA, 25 bp, probe
ttactagagatggatttattgaaaa

SEQ ID NO: 297898 - DNA, 25 bp, probe
ttacagtgaaggtgtcattcacaaa

SEQ ID NO: 297899 - DNA, 25 bp, probe
ttaatagacgagtttcttctcagca

SEQ ID NO: 297900 - DNA, 25 bp, probe
ttctatgcaaggtttacttctcaga

SEQ ID NO: 297901 - DNA, 25 bp, probe
ttctatgcaaggtttacttctcaga

SEQ ID NO: 297902 - DNA, 25 bp, probe
ttaatacaggtttacagttcatgcc

SEQ ID NO: 297903 - DNA, 25 bp, probe
ttaatcacatggtgtagaggctaca

SEQ ID NO: 297904 - DNA, 25 bp, probe
ttaatcacgcgatgttgactgcaca

SEQ ID NO: 297905 - DNA, 25 bp, probe
ttcactccctgaagttcattgccac

SEQ ID NO: 297906 - DNA, 25 bp, probe
ttaatcacctctaatactcatccac

SEQ ID NO: 297907 - DNA, 25 bp, probe
ttaatacctcctccaaatcatcatt

SEQ ID NO: 297908 - DNA, 25 bp, probe
ttaagttcatccctgcaaggatctg

SEQ ID NO: 297909 - DNA, 25 bp, probe
ttcaagtttccaacgcagtgtctca

SEQ ID NO: 297910 - DNA, 25 bp, probe
ttaaggttcgctatcctgatcgcat

SEQ ID NO: 297911 - DNA, 25 bp, probe
ttctcaggattcctaacgattcaaa

SEQ ID NO: 297912 - DNA, 25 bp, probe
ttcctggttcctcaagggcagatat

SEQ ID NO: 297913 - DNA, 25 bp, probe
ttcctggtaactcaaggctaccaag

SEQ ID NO: 297914 - DNA, 25 bp, probe
ttcctaaaactctatcaggtcccaa

SEQ ID NO: 297915 - DNA, 25 bp, probe
ttcggaaaagccccgtgtggccaag

SEQ ID NO: 297916 - DNA, 25 bp, probe
ttcaagaaacgtgacagtgtggccc

SEQ ID NO: 297917 - DNA, 25 bp, probe
ttcaataaaactgcctggctggctc

SEQ ID NO: 297918 - DNA, 25 bp, probe
ttaaaatgagtcatcatctggtcct

SEQ ID NO: 297919 - DNA, 25 bp, probe
ttaagtcgtgtgttcacagagacct

SEQ ID NO: 297920 - DNA, 25 bp, probe
ttacagtcgctgaagctcctgcagc

SEQ ID NO: 297921 - DNA, 25 bp, probe
ttacagtgcatggaatctccatcat

SEQ ID NO: 297922 - DNA, 25 bp, probe
ttacgagcagaaagatccatcttgc

SEQ ID NO: 297923 - DNA, 25 bp, probe
ttactgagcagcatataccctctcg

SEQ ID NO: 297924 - DNA, 25 bp, probe
ttactgagcagcatataccctctcg

SEQ ID NO: 297925 - DNA, 25 bp, probe
ttgaatcacagtatacgctccatcg

SEQ ID NO: 297926 - DNA, 25 bp, probe
ttaacatcgatgatgggtctccagt

SEQ ID NO: 297927 - DNA, 25 bp, probe
ttaacatcgatgatgggtctccagt

SEQ ID NO: 297928 - DNA, 25 bp, probe
ttacctgccaggtcgcagtgttcag

SEQ ID NO: 297929 - DNA, 25 bp, probe
ttcaccccagtgtgaggttaactga

SEQ ID NO: 297930 - DNA, 25 bp, probe
ttcagcccacgcgggaagttcaaag

SEQ ID NO: 297931 - DNA, 25 bp, probe
ttcagctcccaagtttagttcagga

SEQ ID NO: 297932 - DNA, 25 bp, probe
ttcttttaagtgggagtctcaggca

SEQ ID NO: 297933 - DNA, 25 bp, probe
ttccgtgtactcgggaatccggcac

SEQ ID NO: 297934 - DNA, 25 bp, probe
ttcccttcctgcgggtggggagact

SEQ ID NO: 297935 - DNA, 25 bp, probe
ttcaccttccacctgagaggggact

SEQ ID NO: 297936 - DNA, 25 bp, probe
ttaactccagccctgaacaggcacc

SEQ ID NO: 297937 - DNA, 25 bp, probe
ttaactaaccatgaaaagaactact

SEQ ID NO: 297938 - DNA, 25 bp, probe
ttaatctatgatccagccaaacgaa

SEQ ID NO: 297939 - DNA, 25 bp, probe
ttaatcatattcacaagcacaaaag

SEQ ID NO: 297940 - DNA, 25 bp, probe
ttaacatatttactaagccacaaga

SEQ ID NO: 297941 - DNA, 25 bp, probe
ttaatttttacatgaccagaaaaca

SEQ ID NO: 297942 - DNA, 25 bp, probe
ttcacttttttcatgacctagaaaa

SEQ ID NO: 297943 - DNA, 25 bp, probe
ttcacttttatttagcaccagggaa

SEQ ID NO: 297944 - DNA, 25 bp, probe
ttcacggcctttaccaccgtggatg

SEQ ID NO: 297945 - DNA, 25 bp, probe
ttcaaggtctttaccccagaagaag

SEQ ID NO: 297946 - DNA, 25 bp, probe
ttaaaactctgtaccgcacaggaat

SEQ ID NO: 297947 - DNA, 25 bp, probe
ttaacaactcagccatctggcacag

SEQ ID NO: 297948 - DNA, 25 bp, probe
ttaagcgcaagacagctggccagga

SEQ ID NO: 297949 - DNA, 25 bp, probe
ttgggagccagacactccagggatc

SEQ ID NO: 297950 - DNA, 25 bp, probe
ttaagaccaggctgccgaggcgagc

SEQ ID NO: 297951 - DNA, 25 bp, probe
ttcacacccaggctcaagacggagc

SEQ ID NO: 297952 - DNA, 25 bp, probe
ttcaaacctcaggtcacgtccgagg

SEQ ID NO: 297953 - DNA, 25 bp, probe
ttcaaacctcaggtcacgtccgagg

SEQ ID NO: 297954 - DNA, 25 bp, probe
ttcaaacctcaggtcacgtccgagg

SEQ ID NO: 297955 - DNA, 25 bp, probe
ttcaataaacaagatcgtcaggacc

SEQ ID NO: 297956 - DNA, 25 bp, probe
ttgcaaacccaactaagccaggacc

SEQ ID NO: 297957 - DNA, 25 bp, probe
ttaaacctcaagtaacatctgagac

SEQ ID NO: 297958 - DNA, 25 bp, probe
ttacatgccactattaagctgctaa

SEQ ID NO: 297959 - DNA, 25 bp, probe
ttactgcacacctattacctattat

SEQ ID NO: 297960 - DNA, 25 bp, probe
ttacagtcacaatctacttttctta

SEQ ID NO: 297961 - DNA, 25 bp, probe
ttacttttattaatgatctttctta

SEQ ID NO: 297962 - DNA, 25 bp, probe
ttaattattattatcctgattctta

SEQ ID NO: 297963 - DNA, 25 bp, probe
ttaattattattatcctgattctta

SEQ ID NO: 297964 - DNA, 25 bp, probe
ttaattgaaattatggctatatatt

SEQ ID NO: 297965 - DNA, 25 bp, probe
ttacacatgtaatcttgggtttttc

SEQ ID NO: 297966 - DNA, 25 bp, probe
ttacacatgtaatcttgggtttttc

SEQ ID NO: 297967 - DNA, 25 bp, probe
ttaatattaaacctggtgcttctca

SEQ ID NO: 297968 - DNA, 25 bp, probe
ttaatttagacaaatgtatttctga

SEQ ID NO: 297969 - DNA, 25 bp, probe
ttaagtgtttaagtgttattctgaa

SEQ ID NO: 297970 - DNA, 25 bp, probe
ttaagtgtttaagtgttattctgaa

SEQ ID NO: 297971 - DNA, 25 bp, probe
ttaatgtttctaggaactatcttaa

SEQ ID NO: 297972 - DNA, 25 bp, probe
ttcaagcactcttaaaaccacttaa

SEQ ID NO: 297973 - DNA, 25 bp, probe
ttcaagcactcttaaaaccacttaa

SEQ ID NO: 297974 - DNA, 25 bp, probe
ttcaccaaccagttatactccttga

SEQ ID NO: 297975 - DNA, 25 bp, probe
ttcacttaccatattatcgtcatta

SEQ ID NO: 297976 - DNA, 25 bp, probe
ttcaaaatcctttttcgatcattca

SEQ ID NO: 297977 - DNA, 25 bp, probe
ttctaatttttttctcgacattctt

SEQ ID NO: 297978 - DNA, 25 bp, probe
ttctaagtttattgccttgggttat

SEQ ID NO: 297979 - DNA, 25 bp, probe
ttctgggttttacatatgtggctcc

SEQ ID NO: 297980 - DNA, 25 bp, probe
ttgggagttcctagcaagttgacta

SEQ ID NO: 297981 - DNA, 25 bp, probe
ttggtgagttcagtagctttggtat

SEQ ID NO: 297982 - DNA, 25 bp, probe
ttgagcgagcccattttgtggattg

SEQ ID NO: 297983 - DNA, 25 bp, probe
ttaatggcacctcatttggctttgt

SEQ ID NO: 297984 - DNA, 25 bp, probe
ttaatggcacctcatttggctttgt

SEQ ID NO: 297985 - DNA, 25 bp, probe
ttaagatgctcctgattgtggccct

SEQ ID NO: 297986 - DNA, 25 bp, probe
ttaagagccaatcactgatccccaa

SEQ ID NO: 297987 - DNA, 25 bp, probe
ttaagcatataattggtgtccacca

SEQ ID NO: 297988 - DNA, 25 bp, probe
ttgcaagtgacaggagggcccctca

SEQ ID NO: 297989 - DNA, 25 bp, probe
ttgcagaccaagagggaccctggag

SEQ ID NO: 297990 - DNA, 25 bp, probe
ttgcaatactggacgtggagcctca

SEQ ID NO: 297991 - DNA, 25 bp, probe
ttcacaatgtggccgaggactttga

SEQ ID NO: 297992 - DNA, 25 bp, probe
ttacgacggcatgggaatctcttca

SEQ ID NO: 297993 - DNA, 25 bp, probe
ttacgactactgtgatgtccctcag

SEQ ID NO: 297994 - DNA, 25 bp, probe
ttaccctactgatgatgtgttgttg

SEQ ID NO: 297995 - DNA, 25 bp, probe
ttacatcctcttcagattgctttat

SEQ ID NO: 297996 - DNA, 25 bp, probe
ttacacgctgcttgtagacatgtta

SEQ ID NO: 297997 - DNA, 25 bp, probe
ttaactctttgaaactgtatcacct

SEQ ID NO: 297998 - DNA, 25 bp, probe
ttaagagatttctgacatttattct

SEQ ID NO: 297999 - DNA, 25 bp, probe
ttactggtttcttacattgccattt

SEQ ID NO: 298000 - DNA, 25 bp, probe
ttcatctgggttagaaaagccatta

SEQ ID NO: 298001 - DNA, 25 bp, probe
ttcagtaggcctacaaaacctgatg

SEQ ID NO: 298002 - DNA, 25 bp, probe
ttcagagagtacaccaagccctgga

SEQ ID NO: 298003 - DNA, 25 bp, probe
ttcagctggtagggaaagactctgc

SEQ ID NO: 298004 - DNA, 25 bp, probe
ttcagctggacgggaaagtgaagcc

SEQ ID NO: 298005 - DNA, 25 bp, probe
ttcacaaggtgaagaactggaaccc

SEQ ID NO: 298006 - DNA, 25 bp, probe
ttcgacctggaaaacggcagacctc

SEQ ID NO: 298007 - DNA, 25 bp, probe
ttcgacctggaaaacggcagacctc

SEQ ID NO: 298008 - DNA, 25 bp, probe
ttccctcggaagaacttggttcttg

SEQ ID NO: 298009 - DNA, 25 bp, probe
ttccctcggaagaacttggttcttg

SEQ ID NO: 298010 - DNA, 25 bp, probe
ttactgtctgagggaacggggtgct

SEQ ID NO: 298011 - DNA, 25 bp, probe
ttactgtctgagggatcactgtgtc

SEQ ID NO: 298012 - DNA, 25 bp, probe
ttactgctgccacaatcagcatggt

SEQ ID NO: 298013 - DNA, 25 bp, probe
ttacttctcagcttctgcgatcaga

SEQ ID NO: 298014 - DNA, 25 bp, probe
ttcactttcactggtgcacactgaa

SEQ ID NO: 298015 - DNA, 25 bp, probe
ttcacagtaatcaagcctcacgtaa

SEQ ID NO: 298016 - DNA, 25 bp, probe
ttcagagataaatgacaagccttca

SEQ ID NO: 298017 - DNA, 25 bp, probe
ttaacgccaaagaaagactctcaga

SEQ ID NO: 298018 - DNA, 25 bp, probe
ttaacgccaaagaaagactctcaga

SEQ ID NO: 298019 - DNA, 25 bp, probe
ttaactgcacgatattcagatttcg

SEQ ID NO: 298020 - DNA, 25 bp, probe
ttaaggcagcagttattaaattggt

SEQ ID NO: 298021 - DNA, 25 bp, probe
ttcaagaagcaattgattttattga

SEQ ID NO: 298022 - DNA, 25 bp, probe
ttaagacagcacttatattgtacaa

SEQ ID NO: 298023 - DNA, 25 bp, probe
ttcactgaccaggccttggctcaaa

SEQ ID NO: 298024 - DNA, 25 bp, probe
ttcaacatccaagcatgtggccatt

SEQ ID NO: 298025 - DNA, 25 bp, probe
ttcaactgccaatcaaggctaggag

SEQ ID NO: 298026 - DNA, 25 bp, probe
ttcaaggccaatgacacgctgggct

SEQ ID NO: 298027 - DNA, 25 bp, probe
ttcagttgccaaggatccctgatcc

SEQ ID NO: 298028 - DNA, 25 bp, probe
ttcagctatggaactattcttagtc

SEQ ID NO: 298029 - DNA, 25 bp, probe
ttctgcctcaatcttttgcaagccc

SEQ ID NO: 298030 - DNA, 25 bp, probe
ttcagcctcaagctttacacagctg

SEQ ID NO: 298031 - DNA, 25 bp, probe
ttcaccaactgcatcctaaactgcc

SEQ ID NO: 298032 - DNA, 25 bp, probe
ttcaccaactgcatcctaaactgcc

SEQ ID NO: 298033 - DNA, 25 bp, probe
ttcaccaaaatctctgaaggggaaa

SEQ ID NO: 298034 - DNA, 25 bp, probe
ttcaccgaattctggaacgcatgtg

SEQ ID NO: 298035 - DNA, 25 bp, probe
ttactctgtgttcaggtgtggaatt

SEQ ID NO: 298036 - DNA, 25 bp, probe
ttacatctttgtccacgtttaatac

SEQ ID NO: 298037 - DNA, 25 bp, probe
ttaatcttgggtgcatttgtaatat

SEQ ID NO: 298038 - DNA, 25 bp, probe
ttaatctctagggccttttttcaat

SEQ ID NO: 298039 - DNA, 25 bp, probe
ttaatctctagggccttttttcaat

SEQ ID NO: 298040 - DNA, 25 bp, probe
ttgtttttggcaccttacttgacca

SEQ ID NO: 298041 - DNA, 25 bp, probe
ttcttgttttctccttaggtggcca

SEQ ID NO: 298042 - DNA, 25 bp, probe
ttctttctcctctgatttcagttca

SEQ ID NO: 298043 - DNA, 25 bp, probe
ttcacttctactctatttcagttcc

SEQ ID NO: 298044 - DNA, 25 bp, probe
ttcacctccttttgtatggagttcc

SEQ ID NO: 298045 - DNA, 25 bp, probe
ttcacacccattacattgtgggaat

SEQ ID NO: 298046 - DNA, 25 bp, probe
ttcacacccattacattgtgggaat

SEQ ID NO: 298047 - DNA, 25 bp, probe
ttaacatccattaatcagatgcgta

SEQ ID NO: 298048 - DNA, 25 bp, probe
ttaatcctagtaacagtgccatgag

SEQ ID NO: 298049 - DNA, 25 bp, probe
ttcggcctagctaagctgctgccgc

SEQ ID NO: 298050 - DNA, 25 bp, probe
ttctacctgagctcagctgtcaacc

SEQ ID NO: 298051 - DNA, 25 bp, probe
ttctacctgagctcagctgtcaacc

SEQ ID NO: 298052 - DNA, 25 bp, probe
ttcaacatctggttcatttaatgca

SEQ ID NO: 298053 - DNA, 25 bp, probe
ttcacagatctaaattatgtaactg

SEQ ID NO: 298054 - DNA, 25 bp, probe
ttcacagatctaaattatgtaactg

SEQ ID NO: 298055 - DNA, 25 bp, probe
ttacatgttcatctcttgccaaata

SEQ ID NO: 298056 - DNA, 25 bp, probe
ttacatgttttcctctcgaaagcca

SEQ ID NO: 298057 - DNA, 25 bp, probe
ttactgagcttgtcccggaagtcct

SEQ ID NO: 298058 - DNA, 25 bp, probe
ttcagctactggtggcggaggaagc

SEQ ID NO: 298059 - DNA, 25 bp, probe
ttacataatgcttacggggacaagt

SEQ ID NO: 298060 - DNA, 25 bp, probe
ttacataatgcttacggggacaagt

SEQ ID NO: 298061 - DNA, 25 bp, probe
ttactatgtggatggtggtatcagg

SEQ ID NO: 298062 - DNA, 25 bp, probe
ttcacttgggcagcgaggatatcat

SEQ ID NO: 298063 - DNA, 25 bp, probe
ttcatcatgctgagcgccgagtacc

SEQ ID NO: 298064 - DNA, 25 bp, probe
ttctctgtgattgatagactacaca

SEQ ID NO: 298065 - DNA, 25 bp, probe
ttcttttgtttcagtgacacaaatg

SEQ ID NO: 298066 - DNA, 25 bp, probe
ttctttaactccagccgcggaatga

SEQ ID NO: 298067 - DNA, 25 bp, probe
ttccttagaccagcctcctgaaaga

SEQ ID NO: 298068 - DNA, 25 bp, probe
ttcttcaggaccaccaactggcaag

SEQ ID NO: 298069 - DNA, 25 bp, probe
ttgcctcagcggctaccaaagccaa

SEQ ID NO: 298070 - DNA, 25 bp, probe
ttccatggggcgtggcaagggaata

SEQ ID NO: 298071 - DNA, 25 bp, probe
ttcggatggcggcgggaggttgatg

SEQ ID NO: 298072 - DNA, 25 bp, probe
ttccctgatgggttggggcagttac

SEQ ID NO: 298073 - DNA, 25 bp, probe
ttcaatcttaggagacagtgagtta

SEQ ID NO: 298074 - DNA, 25 bp, probe
ttcagctttaagtgatagtgggtag

SEQ ID NO: 298075 - DNA, 25 bp, probe
ttactcataaagggacaggctagct

SEQ ID NO: 298076 - DNA, 25 bp, probe
ttactcataaagggacaggctagct

SEQ ID NO: 298077 - DNA, 25 bp, probe
ttgtctcagaaatcgtgggctacta

SEQ ID NO: 298078 - DNA, 25 bp, probe
ttgtctcagaaatcgtgggctacta

SEQ ID NO: 298079 - DNA, 25 bp, probe
ttactgcagagaaacacggaaacta

SEQ ID NO: 298080 - DNA, 25 bp, probe
ttgacagcggaaaccctggaaaagc

SEQ ID NO: 298081 - DNA, 25 bp, probe
ttacattggcacagagccatggaaa

SEQ ID NO: 298082 - DNA, 25 bp, probe
ttacaggatgacagcagccgagacc

SEQ ID NO: 298083 - DNA, 25 bp, probe
ttacagcgcaacagcagcctgcagc

SEQ ID NO: 298084 - DNA, 25 bp, probe
ttcaaggcaacactgtggctgagtg

SEQ ID NO: 298085 - DNA, 25 bp, probe
ttacacccagacagactgtgtgcca

SEQ ID NO: 298086 - DNA, 25 bp, probe
ttcacctcggacatggcgtatgtca

SEQ ID NO: 298087 - DNA, 25 bp, probe
ttacacaaggagaagaggattgtcc

SEQ ID NO: 298088 - DNA, 25 bp, probe
ttacaccagagagacagagtcctcc

SEQ ID NO: 298089 - DNA, 25 bp, probe
ttacaggagcgagagcgagctctca

SEQ ID NO: 298090 - DNA, 25 bp, probe
ttcaagggcaggtagctgatgctaa

SEQ ID NO: 298091 - DNA, 25 bp, probe
ttcagcgggagattcagatcctcaa

SEQ ID NO: 298092 - DNA, 25 bp, probe
ttcactgtcgacaagaggacatcaa

SEQ ID NO: 298093 - DNA, 25 bp, probe
ttacatgagcccagaggtcatcctg

SEQ ID NO: 298094 - DNA, 25 bp, probe
ttacaagccgcaaaggcagcaggct

SEQ ID NO: 298095 - DNA, 25 bp, probe
ttcacaatcccagagtggcaggcgg

SEQ ID NO: 298096 - DNA, 25 bp, probe
ttaagctcgtcactgcaggtggggg

SEQ ID NO: 298097 - DNA, 25 bp, probe
ttaagctcgtcactgcaggtggggg

SEQ ID NO: 298098 - DNA, 25 bp, probe
ttacaggagtaccagacgtggctgg

SEQ ID NO: 298099 - DNA, 25 bp, probe
ttacaggcgtttcgagctgatccgg

SEQ ID NO: 298100 - DNA, 25 bp, probe
ttcacatggagattgttggtaccca

SEQ ID NO: 298101 - DNA, 25 bp, probe
ttcacatggagattgttggtaccca

SEQ ID NO: 298102 - DNA, 25 bp, probe
ttcacagccatgattcttttgccca

SEQ ID NO: 298103 - DNA, 25 bp, probe
ttaagtcatggtacgtttcctaaag

SEQ ID NO: 298104 - DNA, 25 bp, probe
ttaactgcttcaagtgttacctaac

SEQ ID NO: 298105 - DNA, 25 bp, probe
ttaactgcttcaagtgttacctaac

SEQ ID NO: 298106 - DNA, 25 bp, probe
ttcaacgaaaggcctcaatcccaac

SEQ ID NO: 298107 - DNA, 25 bp, probe
ttcaacgaaaggcctcaatcccaac

SEQ ID NO: 298108 - DNA, 25 bp, probe
ttcaacagtgcatggcctatgagcc

SEQ ID NO: 298109 - DNA, 25 bp, probe
ttcagaagcaccgtgtctgaaccgt

SEQ ID NO: 298110 - DNA, 25 bp, probe
ttcattaagaccttctgacaccctg

SEQ ID NO: 298111 - DNA, 25 bp, probe
ttcaactgagtaagtctgaacctct

SEQ ID NO: 298112 - DNA, 25 bp, probe
ttcaccagcagctaagtgctgacac

SEQ ID NO: 298113 - DNA, 25 bp, probe
ttcaccagcagctaagtgctgacac

SEQ ID NO: 298114 - DNA, 25 bp, probe
ttacatacatcataagctccagcct

SEQ ID NO: 298115 - DNA, 25 bp, probe
ttacacaattataatcaccagcagt

SEQ ID NO: 298116 - DNA, 25 bp, probe
ttaaattgtgtttcagcaggatgta

SEQ ID NO: 298117 - DNA, 25 bp, probe
ttaaactgtacatactgtgcatata

SEQ ID NO: 298118 - DNA, 25 bp, probe
ttaagcagcgtcgagaagtggcaaa

SEQ ID NO: 298119 - DNA, 25 bp, probe
ttaacagcctttggagtcgcaatgt

SEQ ID NO: 298120 - DNA, 25 bp, probe
ttacactgcctcttagcagcctaaa

SEQ ID NO: 298121 - DNA, 25 bp, probe
ttacagctgagcattatgatgttaa

SEQ ID NO: 298122 - DNA, 25 bp, probe
ttcagcgtcgacctcatgagttacc

SEQ ID NO: 298123 - DNA, 25 bp, probe
ttcacaagctaccatctcagatata

SEQ ID NO: 298124 - DNA, 25 bp, probe
ttcacaagctaccatctcagatata

SEQ ID NO: 298125 - DNA, 25 bp, probe
ttaacactgacttagcatatagctt

SEQ ID NO: 298126 - DNA, 25 bp, probe
ttcaccctgacgtgcattgcagaga

SEQ ID NO: 298127 - DNA, 25 bp, probe
ttcccctgaggacctttctgaggag

SEQ ID NO: 298128 - DNA, 25 bp, probe
ttcagactatgagagcacaaatgct

SEQ ID NO: 298129 - DNA, 25 bp, probe
ttcagatgcttcttaggccacatcc

SEQ ID NO: 298130 - DNA, 25 bp, probe
ttcagtctatcatggagcacaacgt

SEQ ID NO: 298131 - DNA, 25 bp, probe
ttcagttatttgcagaagggaaccg

SEQ ID NO: 298132 - DNA, 25 bp, probe
ttcagtttcttcataagatggaaat

SEQ ID NO: 298133 - DNA, 25 bp, probe
ttcagtatttttcatttggaagtcc

SEQ ID NO: 298134 - DNA, 25 bp, probe
ttcaccacttcttctgacatgtggt

SEQ ID NO: 298135 - DNA, 25 bp, probe
ttgcagtgccttgccattcattggc

SEQ ID NO: 298136 - DNA, 25 bp, probe
ttccgtttaccttcatggtgctgtt

SEQ ID NO: 298137 - DNA, 25 bp, probe
ttcagagatttttctcctggcttgg

SEQ ID NO: 298138 - DNA, 25 bp, probe
ttcagcgtgtgaatggctctctggc

SEQ ID NO: 298139 - DNA, 25 bp, probe
ttacttgtgagtctgcttctgcata

SEQ ID NO: 298140 - DNA, 25 bp, probe
ttactttatgtgaattctcatctca

SEQ ID NO: 298141 - DNA, 25 bp, probe
ttacttattggatattcattctttt

SEQ ID NO: 298142 - DNA, 25 bp, probe
ttacattttcggtatatttgtattt

SEQ ID NO: 298143 - DNA, 25 bp, probe
ttacattttctggtactctgtgaaa

SEQ ID NO: 298144 - DNA, 25 bp, probe
ttacacttccttaactgcacgatat

SEQ ID NO: 298145 - DNA, 25 bp, probe
ttacagctactttaacctatgataa

SEQ ID NO: 298146 - DNA, 25 bp, probe
ttacaggctctttaatccatctgga

SEQ ID NO: 298147 - DNA, 25 bp, probe
ttcacatttctaaatcccatcttga

SEQ ID NO: 298148 - DNA, 25 bp, probe
ttcacttttgctattccaatctaca

SEQ ID NO: 298149 - DNA, 25 bp, probe
ttcactattcaggacattctggatt

SEQ ID NO: 298150 - DNA, 25 bp, probe
ttcacttagctttcattcagcagca

SEQ ID NO: 298151 - DNA, 25 bp, probe
ttacttaatgtctttaatgcatttg

SEQ ID NO: 298152 - DNA, 25 bp, probe
ttacatctggatttttagtcattct

SEQ ID NO: 298153 - DNA, 25 bp, probe
ttacattggtacctgttgtcttaat

SEQ ID NO: 298154 - DNA, 25 bp, probe
ttacattggtacctgttgtcttaat

SEQ ID NO: 298155 - DNA, 25 bp, probe
ttaattgtgcaagcttttcctaata

SEQ ID NO: 298156 - DNA, 25 bp, probe
ttaattgtgcaagcttttcctaata

SEQ ID NO: 298157 - DNA, 25 bp, probe
ttaattgtcacaagcttaatttaaa

SEQ ID NO: 298158 - DNA, 25 bp, probe
ttcaatatgtgatctccaagtttaa

SEQ ID NO: 298159 - DNA, 25 bp, probe
ttcaatatgtgatctccaagtttaa

SEQ ID NO: 298160 - DNA, 25 bp, probe
ttcaatatgtgatctccaagtttaa

SEQ ID NO: 298161 - DNA, 25 bp, probe
ttcaaggtgcatacattcagagggc

SEQ ID NO: 298162 - DNA, 25 bp, probe
ttaatggtcatgctgccgcaggatg

SEQ ID NO: 298163 - DNA, 25 bp, probe
ttcaagaccagcctggccaacatgg

SEQ ID NO: 298164 - DNA, 25 bp, probe
ttcagagaccccagtacagaggccc

SEQ ID NO: 298165 - DNA, 25 bp, probe
ttcaagacaacctgctacaagccct

SEQ ID NO: 298166 - DNA, 25 bp, probe
ttcaaatcaacctgcctgaactggc

SEQ ID NO: 298167 - DNA, 25 bp, probe
ttcaaagctcttttcctaactggtt

SEQ ID NO: 298168 - DNA, 25 bp, probe
ttggcaacctattctcactaagatg

SEQ ID NO: 298169 - DNA, 25 bp, probe
ttggaatttaccggctgagagatgc

SEQ ID NO: 298170 - DNA, 25 bp, probe
ttaactttaccatgctcaatgaaaa

SEQ ID NO: 298171 - DNA, 25 bp, probe
ttaactttaccatgctcaatgaaaa

SEQ ID NO: 298172 - DNA, 25 bp, probe
ttaacctcatcagccgtcaggaaga

SEQ ID NO: 298173 - DNA, 25 bp, probe
ttcgaaatcagagccttaggactgt

SEQ ID NO: 298174 - DNA, 25 bp, probe
ttcaaagtcacccctttggaattca

SEQ ID NO: 298175 - DNA, 25 bp, probe
ttcaagcaaacccctgttgaccatg

SEQ ID NO: 298176 - DNA, 25 bp, probe
ttaagacaaacccttgtgcaccttt

SEQ ID NO: 298177 - DNA, 25 bp, probe
ttacaggaagtcccttgccatccta

SEQ ID NO: 298178 - DNA, 25 bp, probe
ttaaaattgtccgttccatctgtga

SEQ ID NO: 298179 - DNA, 25 bp, probe
ttaaaattgtgtgctctcttcttca

SEQ ID NO: 298180 - DNA, 25 bp, probe
ttaaaattgtgtgctctcttcttca

SEQ ID NO: 298181 - DNA, 25 bp, probe
ttaataattgttgactttcttagat

SEQ ID NO: 298182 - DNA, 25 bp, probe
ttcctttgtatcgtactttcctaca

SEQ ID NO: 298183 - DNA, 25 bp, probe
ttctgcatttttctgccgtttttca

SEQ ID NO: 298184 - DNA, 25 bp, probe
ttctgcatttttctgccgtttttca

SEQ ID NO: 298185 - DNA, 25 bp, probe
ttctattttgcgtttcttacctgcc

SEQ ID NO: 298186 - DNA, 25 bp, probe
ttcttatttcagtgtttccttccag

SEQ ID NO: 298187 - DNA, 25 bp, probe
ttcttagctagcagtttttctccca

SEQ ID NO: 298188 - DNA, 25 bp, probe
ttacaaaagcaattttcatttacct

SEQ ID NO: 298189 - DNA, 25 bp, probe
ttcaaggattaattcttcctctacc

SEQ ID NO: 298190 - DNA, 25 bp, probe
ttcaaggtctcttttcatccttcat

SEQ ID NO: 298191 - DNA, 25 bp, probe
ttaaagtgcatgtattttccttgta

SEQ ID NO: 298192 - DNA, 25 bp, probe
ttaaagtgcatagatttctatctta

SEQ ID NO: 298193 - DNA, 25 bp, probe
ttacatagcttaatattttatcatt

SEQ ID NO: 298194 - DNA, 25 bp, probe
ttcaaagcgagaattctatctacat

SEQ ID NO: 298195 - DNA, 25 bp, probe
ttacaaagaggtgctcagcttcaag

SEQ ID NO: 298196 - DNA, 25 bp, probe
ttaaggcagacactgcccctctcaa

SEQ ID NO: 298197 - DNA, 25 bp, probe
ttaactgcaacattgaccttctcaa

SEQ ID NO: 298198 - DNA, 25 bp, probe
ttaattctgaaggactataccgagt

SEQ ID NO: 298199 - DNA, 25 bp, probe
ttcagatctggaagccaaacaccgg

SEQ ID NO: 298200 - DNA, 25 bp, probe
ttcagcattgcggcagctcctgaac

SEQ ID NO: 298201 - DNA, 25 bp, probe
ttcatctagcagacagctctggaca

SEQ ID NO: 298202 - DNA, 25 bp, probe
ttcatgatccaccagctcatgggca

SEQ ID NO: 298203 - DNA, 25 bp, probe
ttctcccacgacgatgcggacgtgt

SEQ ID NO: 298204 - DNA, 25 bp, probe
ttctcccacgacgatgcggacgtgt

SEQ ID NO: 298205 - DNA, 25 bp, probe
ttcactggacagcccagggagtgtg

SEQ ID NO: 298206 - DNA, 25 bp, probe
ttcactaggactacagctgagggag

SEQ ID NO: 298207 - DNA, 25 bp, probe
ttcactagcgtacatctaaggaaaa

SEQ ID NO: 298208 - DNA, 25 bp, probe
ttcagtgacctaccttaaaacaaca

SEQ ID NO: 298209 - DNA, 25 bp, probe
ttcaaggactcactcttagaaacaa

SEQ ID NO: 298210 - DNA, 25 bp, probe
ttcaattatccattcttataagaag

SEQ ID NO: 298211 - DNA, 25 bp, probe
ttaaccatctatagcaaattcaagg

SEQ ID NO: 298212 - DNA, 25 bp, probe
ttcaaccatttccatcaattgaact

SEQ ID NO: 298213 - DNA, 25 bp, probe
ttcagacctttcagacataagctct

SEQ ID NO: 298214 - DNA, 25 bp, probe
ttcagacctttcagacataagctct

SEQ ID NO: 298215 - DNA, 25 bp, probe
ttaaactgtcagtcgaacaagtcat

SEQ ID NO: 298216 - DNA, 25 bp, probe
ttaaatgcgctacccaccaataatg

SEQ ID NO: 298217 - DNA, 25 bp, probe
ttaatactgcattgagccctcagaa

SEQ ID NO: 298218 - DNA, 25 bp, probe
ttcacatactgagacctccagatgc

SEQ ID NO: 298219 - DNA, 25 bp, probe
ttcagcacctacagtgtacagtctt

SEQ ID NO: 298220 - DNA, 25 bp, probe
ttcagcatccgacgggaacatctcc

SEQ ID NO: 298221 - DNA, 25 bp, probe
ttcagcatccgacgggaacatctcc

SEQ ID NO: 298222 - DNA, 25 bp, probe
ttcagcatcatctggcaggaagcac

SEQ ID NO: 298223 - DNA, 25 bp, probe
ttcaataccggagatcatgcaagct

SEQ ID NO: 298224 - DNA, 25 bp, probe
ttaaccaccgcatatgcatgccagg

SEQ ID NO: 298225 - DNA, 25 bp, probe
ttacacgccaagtcaatcatccaca

SEQ ID NO: 298226 - DNA, 25 bp, probe
ttcacggcccagatgatcaccatca

SEQ ID NO: 298227 - DNA, 25 bp, probe
ttcctgcttccgataccctcaggaa

SEQ ID NO: 298228 - DNA, 25 bp, probe
ttcctgcttccgataccctcaggaa

SEQ ID NO: 298229 - DNA, 25 bp, probe
ttcactgtattctttactttaggtg

SEQ ID NO: 298230 - DNA, 25 bp, probe
ttcagtggtcttatttttgggtgat

SEQ ID NO: 298231 - DNA, 25 bp, probe
ttcaattgttggatctcttgggctt

SEQ ID NO: 298232 - DNA, 25 bp, probe
ttcgaatttgtgattttggctttgc

SEQ ID NO: 298233 - DNA, 25 bp, probe
ttcatgcgacgtatattttcctttg

SEQ ID NO: 298234 - DNA, 25 bp, probe
ttaagatggtcatattattcttctt

SEQ ID NO: 298235 - DNA, 25 bp, probe
ttaaatctgttgtttttgctctcct

SEQ ID NO: 298236 - DNA, 25 bp, probe
ttaaatatcttgtctacattctttt

SEQ ID NO: 298237 - DNA, 25 bp, probe
ttaacttctttctatttgacttgtg

SEQ ID NO: 298238 - DNA, 25 bp, probe
ttaagttctagttttctatgttctg

SEQ ID NO: 298239 - DNA, 25 bp, probe
ttaaacctagaagtgtctctcatct

SEQ ID NO: 298240 - DNA, 25 bp, probe
ttaacagcagggtcacttctcattt

SEQ ID NO: 298241 - DNA, 25 bp, probe
ttaacacaggcaatgtcttcttttc

SEQ ID NO: 298242 - DNA, 25 bp, probe
ttaacacaggcaatgtcttcttttc

SEQ ID NO: 298243 - DNA, 25 bp, probe
ttaactaaaatctatgtgcttttca

SEQ ID NO: 298244 - DNA, 25 bp, probe
ttacaccttaactagctgctgcatt

SEQ ID NO: 298245 - DNA, 25 bp, probe
ttaatcctatatgtaatgatcatta

SEQ ID NO: 298246 - DNA, 25 bp, probe
ttaaccttgtaaaatatctataaat

SEQ ID NO: 298247 - DNA, 25 bp, probe
ttacagcttttgtaagcatacaata

SEQ ID NO: 298248 - DNA, 25 bp, probe
ttacagcttgctaaaggaacagaag

SEQ ID NO: 298249 - DNA, 25 bp, probe
ttcagacttggaaaggtcacagaag

SEQ ID NO: 298250 - DNA, 25 bp, probe
ttcaattctgtgatattgtccaaga

SEQ ID NO: 298251 - DNA, 25 bp, probe
ttcaaggtgatcgtattcttccagt

SEQ ID NO: 298252 - DNA, 25 bp, probe
ttcaagggtgcagttatttccagca

SEQ ID NO: 298253 - DNA, 25 bp, probe
ttcactggagtgacttattctaagc

SEQ ID NO: 298254 - DNA, 25 bp, probe
ttcacaagagttgctggtggaaggc

SEQ ID NO: 298255 - DNA, 25 bp, probe
ttcacttcacttttcgtgggatggt

SEQ ID NO: 298256 - DNA, 25 bp, probe
ttcaatgaacctttcctagggctgt

SEQ ID NO: 298257 - DNA, 25 bp, probe
ttctatggagccatctgctttgggg

SEQ ID NO: 298258 - DNA, 25 bp, probe
ttctatggagccatctgctttgggg

SEQ ID NO: 298259 - DNA, 25 bp, probe
ttctatcgaaataatcttcatgcag

SEQ ID NO: 298260 - DNA, 25 bp, probe
ttcggcagaagcacttgtcagaggt

SEQ ID NO: 298261 - DNA, 25 bp, probe
ttaaccatgccaatgcttgtaatgg

SEQ ID NO: 298262 - DNA, 25 bp, probe
ttaaccatggcatctatgttgagga

SEQ ID NO: 298263 - DNA, 25 bp, probe
ttaagtatgtcgccattgttgtaca

SEQ ID NO: 298264 - DNA, 25 bp, probe
ttaagtatgtcgccattgttgtaca

SEQ ID NO: 298265 - DNA, 25 bp, probe
ttaaatagtcactagtattgctaat

SEQ ID NO: 298266 - DNA, 25 bp, probe
ttaatttgctcctgtagctgcatta

SEQ ID NO: 298267 - DNA, 25 bp, probe
ttaatttgctcctgtagctgcatta

SEQ ID NO: 298268 - DNA, 25 bp, probe
ttaactctccctttatggattgatt

SEQ ID NO: 298269 - DNA, 25 bp, probe
ttaacttggcctaatgctaatgaga

SEQ ID NO: 298270 - DNA, 25 bp, probe
ttcacactttcctttgttgcatgca

SEQ ID NO: 298271 - DNA, 25 bp, probe
ttcaacttgctgctcattatctaac

SEQ ID NO: 298272 - DNA, 25 bp, probe
ttcagacggtgaagatgctacgaac

SEQ ID NO: 298273 - DNA, 25 bp, probe
ttcagcagctgagtgttgatgtact

SEQ ID NO: 298274 - DNA, 25 bp, probe
ttcactgctgggatgttgcaggagc

SEQ ID NO: 298275 - DNA, 25 bp, probe
ttcactgctgggatgttgcaggagc

SEQ ID NO: 298276 - DNA, 25 bp, probe
ttcacatctgcactcaaggtcgctg

SEQ ID NO: 298277 - DNA, 25 bp, probe
ttcagcagctcaaacaggtggtaga

SEQ ID NO: 298278 - DNA, 25 bp, probe
ttcagcagctcaaacaggtggtaga

SEQ ID NO: 298279 - DNA, 25 bp, probe
ttcagcagctcaaacaggtggtaga

SEQ ID NO: 298280 - DNA, 25 bp, probe
ttcaggctcatggagcagtgctggg

SEQ ID NO: 298281 - DNA, 25 bp, probe
ttcaggctacatgcaacagtggatt

SEQ ID NO: 298282 - DNA, 25 bp, probe
ttcagttcctctgcactgggaattt

SEQ ID NO: 298283 - DNA, 25 bp, probe
ttcaggaccatcatcagcatgcaaa

SEQ ID NO: 298284 - DNA, 25 bp, probe
ttcatggaccagctcctacagaagg

SEQ ID NO: 298285 - DNA, 25 bp, probe
ttcatggaccagctcctacagaagg

SEQ ID NO: 298286 - DNA, 25 bp, probe
ttcatgtatccctgttactgatagg

SEQ ID NO: 298287 - DNA, 25 bp, probe
ttcagtaacattttctgaccaagag

SEQ ID NO: 298288 - DNA, 25 bp, probe
ttcagtaacattttctgaccaagag

SEQ ID NO: 298289 - DNA, 25 bp, probe
ttcactacacatgttgccccaaata

SEQ ID NO: 298290 - DNA, 25 bp, probe
ttcactacacatgttgccccaaata

SEQ ID NO: 298291 - DNA, 25 bp, probe
ttcaatactcgcaagtgccccgaaa

SEQ ID NO: 298292 - DNA, 25 bp, probe
ttcacaaattgcaaatccgctagaa

SEQ ID NO: 298293 - DNA, 25 bp, probe
ttacaattcctaatcttgagcaaat

SEQ ID NO: 298294 - DNA, 25 bp, probe
ttcaaatgtagttttcatgacaatt

SEQ ID NO: 298295 - DNA, 25 bp, probe
ttaaagctgcgttttcttgctgttg

SEQ ID NO: 298296 - DNA, 25 bp, probe
ttaacagtgcaatcctttctgtgga

SEQ ID NO: 298297 - DNA, 25 bp, probe
ttcagaagtgcctcactgttctcgt

SEQ ID NO: 298298 - DNA, 25 bp, probe
ttaataatcctggccaactctcgta

SEQ ID NO: 298299 - DNA, 25 bp, probe
ttaataatcctggccaactctcgta

SEQ ID NO: 298300 - DNA, 25 bp, probe
ttaatattcctggcatacctttaag

SEQ ID NO: 298301 - DNA, 25 bp, probe
ttcaaatcccttacatcctttagca

SEQ ID NO: 298302 - DNA, 25 bp, probe
ttcacattccctgactttgtaacag

SEQ ID NO: 298303 - DNA, 25 bp, probe
ttcacatcatcagcttgcagtttgt

SEQ ID NO: 298304 - DNA, 25 bp, probe
ttacaatctatcatgagtattatta

SEQ ID NO: 298305 - DNA, 25 bp, probe
ttcacgtgtatcagagcctgtacat

SEQ ID NO: 298306 - DNA, 25 bp, probe
ttcaagggcatttgacactcttgca

SEQ ID NO: 298307 - DNA, 25 bp, probe
ttcacagaattttgcaacttataag

SEQ ID NO: 298308 - DNA, 25 bp, probe
ttcacagaattttgcaacttataag

SEQ ID NO: 298309 - DNA, 25 bp, probe
ttcacagaactcctcacactggtga

SEQ ID NO: 298310 - DNA, 25 bp, probe
ttcacagtacacgtcacagtattga

SEQ ID NO: 298311 - DNA, 25 bp, probe
ttcagcagcatggacagtcactctt

SEQ ID NO: 298312 - DNA, 25 bp, probe
ttcacagcatcaagcagtccacagc

SEQ ID NO: 298313 - DNA, 25 bp, probe
ttcacagcactggatgcaataaagg

SEQ ID NO: 298314 - DNA, 25 bp, probe
ttcacagcactggatgcaataaagg

SEQ ID NO: 298315 - DNA, 25 bp, probe
ttcacagagctcgcacacaagggtg

SEQ ID NO: 298316 - DNA, 25 bp, probe
ttcacagacattgaacaataccagt

SEQ ID NO: 298317 - DNA, 25 bp, probe
ttcaaggcattgagaatgtacctga

SEQ ID NO: 298318 - DNA, 25 bp, probe
ttaactgcacagagggctacttcat

SEQ ID NO: 298319 - DNA, 25 bp, probe
ttaacatgcatctttggacatcaat

SEQ ID NO: 298320 - DNA, 25 bp, probe
ttaagactctgttgatgtgataatt

SEQ ID NO: 298321 - DNA, 25 bp, probe
ttcagagcacttgggattgtaagtt

SEQ ID NO: 298322 - DNA, 25 bp, probe
ttcaaggctatgacagtctgctacg

SEQ ID NO: 298323 - DNA, 25 bp, probe
ttcaatatccatggagtctcttctg

SEQ ID NO: 298324 - DNA, 25 bp, probe
ttcaaagccattgggcttcctgtgt

SEQ ID NO: 298325 - DNA, 25 bp, probe
ttcaaagctcctcggctatgctaat

SEQ ID NO: 298326 - DNA, 25 bp, probe
ttcactgaatgcttctgacttcata

SEQ ID NO: 298327 - DNA, 25 bp, probe
ttcacttcatgcccatgtctactat

SEQ ID NO: 298328 - DNA, 25 bp, probe
ttcaggacatgctatcttctatttg

SEQ ID NO: 298329 - DNA, 25 bp, probe
ttcatgggagctcttttctgatcca

SEQ ID NO: 298330 - DNA, 25 bp, probe
ttcatgtggcctgtttcatcagccg

SEQ ID NO: 298331 - DNA, 25 bp, probe
ttctatgccctgttgggcatcccgc

SEQ ID NO: 298332 - DNA, 25 bp, probe
ttcagacacactttggctgatcccc

SEQ ID NO: 298333 - DNA, 25 bp, probe
ttctcaactgctagaggctacccca

SEQ ID NO: 298334 - DNA, 25 bp, probe
ttcttacgtacactgtacttctgtg

SEQ ID NO: 298335 - DNA, 25 bp, probe
ttcttacttccggtattctctgatg

SEQ ID NO: 298336 - DNA, 25 bp, probe
ttctttttccagtctattttctgtc

SEQ ID NO: 298337 - DNA, 25 bp, probe
ttctttttcaatcctcaggttccct

SEQ ID NO: 298338 - DNA, 25 bp, probe
ttgttttggactctctgtggtccct

SEQ ID NO: 298339 - DNA, 25 bp, probe
ttgttacaggacactcgctgggggc

SEQ ID NO: 298340 - DNA, 25 bp, probe
ttgttacaggacactcgctgggggc

SEQ ID NO: 298341 - DNA, 25 bp, probe
ttcattgccaagtacctcggggggc

SEQ ID NO: 298342 - DNA, 25 bp, probe
ttcatccaatcctcactgggtgggg

SEQ ID NO: 298343 - DNA, 25 bp, probe
ttcatcaacatccccagctggggct

SEQ ID NO: 298344 - DNA, 25 bp, probe
ttcatcaacatccccagctggggct

SEQ ID NO: 298345 - DNA, 25 bp, probe
ttcatcaacatccccagctggggct

SEQ ID NO: 298346 - DNA, 25 bp, probe
ttcactactcaatctgatgtatggt

SEQ ID NO: 298347 - DNA, 25 bp, probe
ttcgatttgcacactgatttggccc

SEQ ID NO: 298348 - DNA, 25 bp, probe
ttcagtgtaacaacattatctgacc

SEQ ID NO: 298349 - DNA, 25 bp, probe
ttcgtttttgaatacatgcacacag

SEQ ID NO: 298350 - DNA, 25 bp, probe
ttcagttttgactaaggatgacact

SEQ ID NO: 298351 - DNA, 25 bp, probe
ttcgtctttgagcagcagtgccaac

SEQ ID NO: 298352 - DNA, 25 bp, probe
ttcagttgttgacacttgcctgcac

SEQ ID NO: 298353 - DNA, 25 bp, probe
ttcagtgttgtacgacgatgtatca

SEQ ID NO: 298354 - DNA, 25 bp, probe
ttaagatgttgatcacacagcttca

SEQ ID NO: 298355 - DNA, 25 bp, probe
ttaactctgtcttcacctgattcaa

SEQ ID NO: 298356 - DNA, 25 bp, probe
ttcataatttcttcactcaatctct

SEQ ID NO: 298357 - DNA, 25 bp, probe
ttcagaagctccgcttcacatgcag

SEQ ID NO: 298358 - DNA, 25 bp, probe
ttcagcacaccaatggtgtcaatgg

SEQ ID NO: 298359 - DNA, 25 bp, probe
ttctcaatgctcttgggtgcaaact

SEQ ID NO: 298360 - DNA, 25 bp, probe
ttctgctgagcaagtgtggctgcta

SEQ ID NO: 298361 - DNA, 25 bp, probe
ttcatgccatcaacttgacgctggt

SEQ ID NO: 298362 - DNA, 25 bp, probe
ttcaggcatcaagttgaccatcaac

SEQ ID NO: 298363 - DNA, 25 bp, probe
ttcagttcagtgtatgaccaaaagc

SEQ ID NO: 298364 - DNA, 25 bp, probe
ttcagcttcacggtgatgaaaaacc

SEQ ID NO: 298365 - DNA, 25 bp, probe
ttcagcttcacggtgatgaaaaacc

SEQ ID NO: 298366 - DNA, 25 bp, probe
ttcactacactgccttacataaacc

SEQ ID NO: 298367 - DNA, 25 bp, probe
ttctcagactagcctgtaccgacac

SEQ ID NO: 298368 - DNA, 25 bp, probe
ttcatcgacagagcgctaagcgacg

SEQ ID NO: 298369 - DNA, 25 bp, probe
ttctgcgatacgaccatcaacagag

SEQ ID NO: 298370 - DNA, 25 bp, probe
ttctgcgatacgaccatcaacagag

SEQ ID NO: 298371 - DNA, 25 bp, probe
ttcatgctgtcggatctggccgagg

SEQ ID NO: 298372 - DNA, 25 bp, probe
ttcatgtttctgtctggggaaggca

SEQ ID NO: 298373 - DNA, 25 bp, probe
ttaagatggtgccttcgtgaaggct

SEQ ID NO: 298374 - DNA, 25 bp, probe
ttaagagggtgttcgggatgttccg

SEQ ID NO: 298375 - DNA, 25 bp, probe
ttctactgggttttgggtctaccag

SEQ ID NO: 298376 - DNA, 25 bp, probe
ttctgagtgttgatgggggttacca

SEQ ID NO: 298377 - DNA, 25 bp, probe
ttcttcatgttcattgggtttatcc

SEQ ID NO: 298378 - DNA, 25 bp, probe
ttcattgtggccctgaaggttctct

SEQ ID NO: 298379 - DNA, 25 bp, probe
ttcagatgggctgtgcacacggttg

SEQ ID NO: 298380 - DNA, 25 bp, probe
ttcaatgagacggtgctcactgtgt

SEQ ID NO: 298381 - DNA, 25 bp, probe
ttcagaggacagggtacctgctgtg

SEQ ID NO: 298382 - DNA, 25 bp, probe
ttaatgacaatgaagtgacactttg

SEQ ID NO: 298383 - DNA, 25 bp, probe
ttaagatcacagacaatgccctctc

SEQ ID NO: 298384 - DNA, 25 bp, probe
ttaagatcacagacaatgccctctc

SEQ ID NO: 298385 - DNA, 25 bp, probe
ttaagatgcatggccaagctctctg

SEQ ID NO: 298386 - DNA, 25 bp, probe
ttcatggagatgcccactctcctgt

SEQ ID NO: 298387 - DNA, 25 bp, probe
ttcagtatgtcacctttgctgcttc

SEQ ID NO: 298388 - DNA, 25 bp, probe
ttcagctttagggtcctgcttcatg

SEQ ID NO: 298389 - DNA, 25 bp, probe
ttcaatttatggtcttctgttttga

SEQ ID NO: 298390 - DNA, 25 bp, probe
ttcaataggaatcattcttctcttg

SEQ ID NO: 298391 - DNA, 25 bp, probe
ttcaataaaaggtgcctctgcttga

SEQ ID NO: 298392 - DNA, 25 bp, probe
ttcagaaaccagttggctctagcta

SEQ ID NO: 298393 - DNA, 25 bp, probe
ttcagatgatcacagtcgtgttaaa

SEQ ID NO: 298394 - DNA, 25 bp, probe
ttcagatgatcacagtcgtgttaaa

SEQ ID NO: 298395 - DNA, 25 bp, probe
ttcaagccaacatgcctttaaattc

SEQ ID NO: 298396 - DNA, 25 bp, probe
ttaacacaacacctgtccttactgt

SEQ ID NO: 298397 - DNA, 25 bp, probe
ttcaaacagaacactcctttcctca

SEQ ID NO: 298398 - DNA, 25 bp, probe
ttcaaacagaacactcctttcctca

SEQ ID NO: 298399 - DNA, 25 bp, probe
ttaacacaccacactggcgaaccat

SEQ ID NO: 298400 - DNA, 25 bp, probe
ttaacacaccacactggcgaaccat

SEQ ID NO: 298401 - DNA, 25 bp, probe
ttaagacagccatccatgtgcatga

SEQ ID NO: 298402 - DNA, 25 bp, probe
ttcagaaggtcatcagattgtgaga

SEQ ID NO: 298403 - DNA, 25 bp, probe
ttcaaggctgtcatcactcgagcag

SEQ ID NO: 298404 - DNA, 25 bp, probe
ttcaacgcagccaatgacattgaca

SEQ ID NO: 298405 - DNA, 25 bp, probe
ttcacccaatgttcacatctgcact

SEQ ID NO: 298406 - DNA, 25 bp, probe
ttcagcgccaatacaaaagactctg

SEQ ID NO: 298407 - DNA, 25 bp, probe
ttcaagaccataaactggactctgc

SEQ ID NO: 298408 - DNA, 25 bp, probe
ttcaagtcactaatcacctgatcat

SEQ ID NO: 298409 - DNA, 25 bp, probe
ttcaagtcactaatcacctgatcat

SEQ ID NO: 298410 - DNA, 25 bp, probe
ttaagtgatccaaagctgctgaagt

SEQ ID NO: 298411 - DNA, 25 bp, probe
ttgcaagggccaaactctggttttc

SEQ ID NO: 298412 - DNA, 25 bp, probe
ttcaagggcagaagagttttcattt

SEQ ID NO: 298413 - DNA, 25 bp, probe
ttcaacgagaagcaggtttattttt

SEQ ID NO: 298414 - DNA, 25 bp, probe
ttctagagaaactagttttactaat

SEQ ID NO: 298415 - DNA, 25 bp, probe
ttctagatactacagttcttactcc

SEQ ID NO: 298416 - DNA, 25 bp, probe
ttctacatactatggaatttctccc

SEQ ID NO: 298417 - DNA, 25 bp, probe
ttcacattactatagatatgtctat

SEQ ID NO: 298418 - DNA, 25 bp, probe
ttcagttacttacctgcatgtgttg

SEQ ID NO: 298419 - DNA, 25 bp, probe
ttcagcattcactaaccctgtttag

SEQ ID NO: 298420 - DNA, 25 bp, probe
ttcacttcagccagcgacgtttgga

SEQ ID NO: 298421 - DNA, 25 bp, probe
ttcactcctgccaatggagctgggg

SEQ ID NO: 298422 - DNA, 25 bp, probe
ttcagtcctagcaagaagcgagaat

SEQ ID NO: 298423 - DNA, 25 bp, probe
ttcagccaataggagccagccagga

SEQ ID NO: 298424 - DNA, 25 bp, probe
ttcagcccatgggggtccaggggag

SEQ ID NO: 298425 - DNA, 25 bp, probe
ttcgcaccattgcggtcgcgcggat

SEQ ID NO: 298426 - DNA, 25 bp, probe
ttcgagtatatgcggcacggggacc

SEQ ID NO: 298427 - DNA, 25 bp, probe
ttccagttaaggaccgaggccctgc

SEQ ID NO: 298428 - DNA, 25 bp, probe
ttaagtatatgagtgccccaacccc

SEQ ID NO: 298429 - DNA, 25 bp, probe
ttcaaggcgatggggcccaagccgc

SEQ ID NO: 298430 - DNA, 25 bp, probe
ttcaatgcgaaggacgcgcaaatgc

SEQ ID NO: 298431 - DNA, 25 bp, probe
ttcctggaagaagccaacctcatga

SEQ ID NO: 298432 - DNA, 25 bp, probe
ttcacggaacaatcccaaatgcact

SEQ ID NO: 298433 - DNA, 25 bp, probe
ttcagaagagaatccccaccaactt

SEQ ID NO: 298434 - DNA, 25 bp, probe
ttcaaaggagatctatggaccaata

SEQ ID NO: 298435 - DNA, 25 bp, probe
ttcaaaggagatctatggaccaata

SEQ ID NO: 298436 - DNA, 25 bp, probe
ttcagccagcgacgtttggagctat

SEQ ID NO: 298437 - DNA, 25 bp, probe
ttcagccagtgtcctagcaaagctg

SEQ ID NO: 298438 - DNA, 25 bp, probe
ttcagccagatccttccaatgaagc

SEQ ID NO: 298439 - DNA, 25 bp, probe
ttcatccgttgtatcagaaagcgat

SEQ ID NO: 298440 - DNA, 25 bp, probe
ttcaccgtagtaacacataaagtaa

SEQ ID NO: 298441 - DNA, 25 bp, probe
ttcaccgtagtaacacataaagtaa

SEQ ID NO: 298442 - DNA, 25 bp, probe
ttcaacttagttcccaaaatgagcc

SEQ ID NO: 298443 - DNA, 25 bp, probe
ttcaattgtggaccccaaagtgaca

SEQ ID NO: 298444 - DNA, 25 bp, probe
ttaactggcttgttcaaaggagaca

SEQ ID NO: 298445 - DNA, 25 bp, probe
ttaactggcctgatctaacaatgaa

SEQ ID NO: 298446 - DNA, 25 bp, probe
ttaactgggatgatctcattaataa

SEQ ID NO: 298447 - DNA, 25 bp, probe
ttaactggggtatcagctgaatcaa

SEQ ID NO: 298448 - DNA, 25 bp, probe
ttcccgtggggatcactgaaccaga

SEQ ID NO: 298449 - DNA, 25 bp, probe
ttccgaggggcacatcaaaatcgct

SEQ ID NO: 298450 - DNA, 25 bp, probe
ttctctgagagactgcagataataa

SEQ ID NO: 298451 - DNA, 25 bp, probe
ttctcttgcagaccaagagggaccc

SEQ ID NO: 298452 - DNA, 25 bp, probe
ttcatcatggcctccaagtggtacc

SEQ ID NO: 298453 - DNA, 25 bp, probe
ttcacagtcagctgctcaacggaat

SEQ ID NO: 298454 - DNA, 25 bp, probe
ttcagaggatgctgctacacaggag

SEQ ID NO: 298455 - DNA, 25 bp, probe
ttcagaggcagcaagcactacagag

SEQ ID NO: 298456 - DNA, 25 bp, probe
ttcacagcagtgacagcctatcaga

SEQ ID NO: 298457 - DNA, 25 bp, probe
ttcatacagttacttaagagtgttg

SEQ ID NO: 298458 - DNA, 25 bp, probe
ttcatattcatttgtatccaaggtg

SEQ ID NO: 298459 - DNA, 25 bp, probe
ttcatattcaatatcttacagtgat

SEQ ID NO: 298460 - DNA, 25 bp, probe
ttcatattcaatatcttacagtgat

SEQ ID NO: 298461 - DNA, 25 bp, probe
ttcaagccaatcccttaatgtcatt

SEQ ID NO: 298462 - DNA, 25 bp, probe
ttcacagaacttctcttttatataa

SEQ ID NO: 298463 - DNA, 25 bp, probe
ttcacacaacctccctgattttaaa

SEQ ID NO: 298464 - DNA, 25 bp, probe
ttcagaacacccctcagttttacta

SEQ ID NO: 298465 - DNA, 25 bp, probe
ttaatacacccagatattttcttca

SEQ ID NO: 298466 - DNA, 25 bp, probe
ttcaaacacccaaattgtcttccta

SEQ ID NO: 298467 - DNA, 25 bp, probe
ttaactgttcacaaattctctgtcc

SEQ ID NO: 298468 - DNA, 25 bp, probe
ttcagacttatcaccattcttatgt

SEQ ID NO: 298469 - DNA, 25 bp, probe
ttcgccgtattggccaggctgattt

SEQ ID NO: 298470 - DNA, 25 bp, probe
ttccactatttgcagaggcttattc

SEQ ID NO: 298471 - DNA, 25 bp, probe
ttctactatccttgctaagttttca

SEQ ID NO: 298472 - DNA, 25 bp, probe
ttcttgcttcccttaaattaatatg

SEQ ID NO: 298473 - DNA, 25 bp, probe
ttctttccctacaaactgaacatgg

SEQ ID NO: 298474 - DNA, 25 bp, probe
ttcttgtcctaaagcaattgaagtt

SEQ ID NO: 298475 - DNA, 25 bp, probe
ttctttaccacaagctatggtgact

SEQ ID NO: 298476 - DNA, 25 bp, probe
ttcttgtcctcgagccatagtgaac

SEQ ID NO: 298477 - DNA, 25 bp, probe
ttcaattccactgagcacaagtacc

SEQ ID NO: 298478 - DNA, 25 bp, probe
ttaattccaatgtaccaggtgaact

SEQ ID NO: 298479 - DNA, 25 bp, probe
ttctatttattgtaccaaagacagt

SEQ ID NO: 298480 - DNA, 25 bp, probe
ttctactctttctgccaagagcctg

SEQ ID NO: 298481 - DNA, 25 bp, probe
ttcattcctttcagccatcgtcctt

SEQ ID NO: 298482 - DNA, 25 bp, probe
ttcatgtcgtcatgcatctgtcatg

SEQ ID NO: 298483 - DNA, 25 bp, probe
ttcagtcggaatggcgctcagcaga

SEQ ID NO: 298484 - DNA, 25 bp, probe
ttcactctgatgactcagactcaga

SEQ ID NO: 298485 - DNA, 25 bp, probe
ttcacatctgtaaagcaatcaattg

SEQ ID NO: 298486 - DNA, 25 bp, probe
ttcaacttcctgccagacaatgctg

SEQ ID NO: 298487 - DNA, 25 bp, probe
ttcatagactccatcaagaatgctg

SEQ ID NO: 298488 - DNA, 25 bp, probe
ttcaagacttcaggtgccaggctga

SEQ ID NO: 298489 - DNA, 25 bp, probe
ttcacagacctacgggatggcatca

SEQ ID NO: 298490 - DNA, 25 bp, probe
ttcactgccgggcatggtggctcat

SEQ ID NO: 298491 - DNA, 25 bp, probe
ttcaggccgggcctggtggttcatg

SEQ ID NO: 298492 - DNA, 25 bp, probe
ttcggggtgacactgtgggaaatgt

SEQ ID NO: 298493 - DNA, 25 bp, probe
ttctagggtgtagctgggtacatat

SEQ ID NO: 298494 - DNA, 25 bp, probe
ttcgacgtgtgtgtcatggcttaaa

SEQ ID NO: 298495 - DNA, 25 bp, probe
ttcaactgttgtcttgctcttgata

SEQ ID NO: 298496 - DNA, 25 bp, probe
ttcaagcgtggtctgccactgtttc

SEQ ID NO: 298497 - DNA, 25 bp, probe
ttcaagcgtggtctgccactgtttc

SEQ ID NO: 298498 - DNA, 25 bp, probe
ttcaaagatggggagccctcaggtc

SEQ ID NO: 298499 - DNA, 25 bp, probe
ttcaatgaagagtgtccccggctca

SEQ ID NO: 298500 - DNA, 25 bp, probe
ttcacgaaacaaatcccctgtgtcc

SEQ ID NO: 298501 - DNA, 25 bp, probe
ttcaccaaacaatcccagtggctca

SEQ ID NO: 298502 - DNA, 25 bp, probe
ttcaccaaacaatcccagtggctca

SEQ ID NO: 298503 - DNA, 25 bp, probe
ttcaggaaacaatcaccttgctcca

SEQ ID NO: 298504 - DNA, 25 bp, probe
ttcggaaaccctttttgtggcatgt

SEQ ID NO: 298505 - DNA, 25 bp, probe
ttcggaaaccctttttgtggcatgt

SEQ ID NO: 298506 - DNA, 25 bp, probe
ttcctacaacttttcttttctcagt

SEQ ID NO: 298507 - DNA, 25 bp, probe
ttctccgcaagttgtcctatttttg

SEQ ID NO: 298508 - DNA, 25 bp, probe
ttcatcggcacactcagtcaagtta

SEQ ID NO: 298509 - DNA, 25 bp, probe
ttcactgcaccatcagtgcactgtc

SEQ ID NO: 298510 - DNA, 25 bp, probe
ttcactcctaacatgatctgtgctg

SEQ ID NO: 298511 - DNA, 25 bp, probe
ttcacctctgaaattattctgggtt

SEQ ID NO: 298512 - DNA, 25 bp, probe
ttcagcacttaactatgagccaggc

SEQ ID NO: 298513 - DNA, 25 bp, probe
ttcacctgctctaggtgcaaaggca

SEQ ID NO: 298514 - DNA, 25 bp, probe
ttaatgtatatttgctgcaaagaga

SEQ ID NO: 298515 - DNA, 25 bp, probe
ttaatagtcattccaaatatgagat

SEQ ID NO: 298516 - DNA, 25 bp, probe
ttcaatatgtacagaattcatggat

SEQ ID NO: 298517 - DNA, 25 bp, probe
ttgtatgtgtggtgacttgcggatt

SEQ ID NO: 298518 - DNA, 25 bp, probe
ttgactggtgggctcttggagtgct

SEQ ID NO: 298519 - DNA, 25 bp, probe
ttgactggtgggctcttggagtgct

SEQ ID NO: 298520 - DNA, 25 bp, probe
ttgactacttggaactaggctctta

SEQ ID NO: 298521 - DNA, 25 bp, probe
ttcattcacttgctgagctacgcct

SEQ ID NO: 298522 - DNA, 25 bp, probe
ttcattcacttgctgagctacgcct

SEQ ID NO: 298523 - DNA, 25 bp, probe
ttcattgcagaagaggccgcggctt

SEQ ID NO: 298524 - DNA, 25 bp, probe
ttcaatcaaagatcagccagcgtga

SEQ ID NO: 298525 - DNA, 25 bp, probe
ttcttgcaaagcacaagctgggacc

SEQ ID NO: 298526 - DNA, 25 bp, probe
ttcttccgagaccaagggaggcaga

SEQ ID NO: 298527 - DNA, 25 bp, probe
ttcttccggcaaaacgatgggcagt

SEQ ID NO: 298528 - DNA, 25 bp, probe
ttcgtgccggttttcagctattagc

SEQ ID NO: 298529 - DNA, 25 bp, probe
ttcggccggactctttgtgataaac

SEQ ID NO: 298530 - DNA, 25 bp, probe
ttcggccggactctttgtgataaac

SEQ ID NO: 298531 - DNA, 25 bp, probe
ttcaggcacaggcgttttcaggaaa

SEQ ID NO: 298532 - DNA, 25 bp, probe
ttcagtgcaactgtttagtcatgtg

SEQ ID NO: 298533 - DNA, 25 bp, probe
ttcagcgaaatcaggctattcaggc

SEQ ID NO: 298534 - DNA, 25 bp, probe
ttcggaaagctatgcttctgggcgt

SEQ ID NO: 298535 - DNA, 25 bp, probe
ttcggaaagctatgcttctgggcgt

SEQ ID NO: 298536 - DNA, 25 bp, probe
ttcggaaagccttgtcatttgacaa

SEQ ID NO: 298537 - DNA, 25 bp, probe
ttcaggaaagacggattgcattaga

SEQ ID NO: 298538 - DNA, 25 bp, probe
ttcagacattaactggcttgttcaa

SEQ ID NO: 298539 - DNA, 25 bp, probe
ttcacatcattgcacacctgtttaa

SEQ ID NO: 298540 - DNA, 25 bp, probe
ttcacatttgtctcctggtttacga

SEQ ID NO: 298541 - DNA, 25 bp, probe
ttcaatctcattgtcactggatagt

SEQ ID NO: 298542 - DNA, 25 bp, probe
ttcaatctcattgtcactggatagt

SEQ ID NO: 298543 - DNA, 25 bp, probe
ttcagttcactgttcagtttagcat

SEQ ID NO: 298544 - DNA, 25 bp, probe
ttcaattacatgttgcttccagaca

SEQ ID NO: 298545 - DNA, 25 bp, probe
ttcagatttatcttgactaattcat

SEQ ID NO: 298546 - DNA, 25 bp, probe
ttcagatttatcttgactaattcat

SEQ ID NO: 298547 - DNA, 25 bp, probe
ttcagatctttctttgtagtgtccc

SEQ ID NO: 298548 - DNA, 25 bp, probe
ttgactttcctgtttactgtcgggc

SEQ ID NO: 298549 - DNA, 25 bp, probe
ttgcctggcccgttgaagttccagg

SEQ ID NO: 298550 - DNA, 25 bp, probe
ttccagaagccggtcaagttccagg

SEQ ID NO: 298551 - DNA, 25 bp, probe
ttctcagaagactgtaatgtacctg

SEQ ID NO: 298552 - DNA, 25 bp, probe
ttctctagaacaggtcggtggccac

SEQ ID NO: 298553 - DNA, 25 bp, probe
ttcagcaccaaagccggtggacagc

SEQ ID NO: 298554 - DNA, 25 bp, probe
ttcacactaacacagcgagggactc

SEQ ID NO: 298555 - DNA, 25 bp, probe
ttggattaaccggctgcagagggtc

SEQ ID NO: 298556 - DNA, 25 bp, probe
ttcagagaacaccctctaggggctt

SEQ ID NO: 298557 - DNA, 25 bp, probe
ttcaaacgcactgctctgagaggcc

SEQ ID NO: 298558 - DNA, 25 bp, probe
ttcaggatgcaagttccatgagagc

SEQ ID NO: 298559 - DNA, 25 bp, probe
ttcaggagaccagcgagaggccctg

SEQ ID NO: 298560 - DNA, 25 bp, probe
ttcagccagacgagcgagctggcca

SEQ ID NO: 298561 - DNA, 25 bp, probe
ttctccggcagttctggttctgccg

SEQ ID NO: 298562 - DNA, 25 bp, probe
ttctcttacattttcgtcctgtagc

SEQ ID NO: 298563 - DNA, 25 bp, probe
ttcttgatgtgcagaacctccgttg

SEQ ID NO: 298564 - DNA, 25 bp, probe
ttcttcatgagtgcaactctccgta

SEQ ID NO: 298565 - DNA, 25 bp, probe
ttcattcagcgtgcttggtccgaca

SEQ ID NO: 298566 - DNA, 25 bp, probe
ttcattcagcgtgcttggtccgaca

SEQ ID NO: 298567 - DNA, 25 bp, probe
ttcaatcgcagagctctggatcctg

SEQ ID NO: 298568 - DNA, 25 bp, probe
ttcgggcgagcaatgctgcagtcct

SEQ ID NO: 298569 - DNA, 25 bp, probe
ttcacggtgcacatgctggcattca

SEQ ID NO: 298570 - DNA, 25 bp, probe
ttcacggtgcacatgctggcattca

SEQ ID NO: 298571 - DNA, 25 bp, probe
ttcacggtgcacatgctggcattca

SEQ ID NO: 298572 - DNA, 25 bp, probe
ttcatccggcacttgatggagaagg

SEQ ID NO: 298573 - DNA, 25 bp, probe
ttcatccatgcctaccaggtgaagc

SEQ ID NO: 298574 - DNA, 25 bp, probe
ttcagtaccatccaatggagcaagc

SEQ ID NO: 298575 - DNA, 25 bp, probe
ttcagggccatccgggagacaggac

SEQ ID NO: 298576 - DNA, 25 bp, probe
ttcagagtctagctgggaacagaga

SEQ ID NO: 298577 - DNA, 25 bp, probe
ttcagagtctagctgggaacagaga

SEQ ID NO: 298578 - DNA, 25 bp, probe
ttaagtctatccgtgagaccatgaa

SEQ ID NO: 298579 - DNA, 25 bp, probe
ttcatcctcttccggaacgagacgg

SEQ ID NO: 298580 - DNA, 25 bp, probe
ttcttctttcagaggagcgcctggg

SEQ ID NO: 298581 - DNA, 25 bp, probe
ttcttagttctgtgaacacctggga

SEQ ID NO: 298582 - DNA, 25 bp, probe
ttctttgctctttagaacccagtga

SEQ ID NO: 298583 - DNA, 25 bp, probe
ttctagttgcttcatggactaaaag

SEQ ID NO: 298584 - DNA, 25 bp, probe
ttctcgaaattggaggactcctttg

SEQ ID NO: 298585 - DNA, 25 bp, probe
ttctaagcaatacgaggccaccttc

SEQ ID NO: 298586 - DNA, 25 bp, probe
ttctaagcacaaccagaggcccaac

SEQ ID NO: 298587 - DNA, 25 bp, probe
ttgtatgtacaacccaacaggcaag

SEQ ID NO: 298588 - DNA, 25 bp, probe
ttgcattaccagccccaaagtaacg

SEQ ID NO: 298589 - DNA, 25 bp, probe
ttcactccctaaccaaaggaatagg

SEQ ID NO: 298590 - DNA, 25 bp, probe
ttcaatccctaaaacaaaaagcaag

SEQ ID NO: 298591 - DNA, 25 bp, probe
ttcctctcacccacaaaacaatgta

SEQ ID NO: 298592 - DNA, 25 bp, probe
ttcacaccctctatcataaacatat

SEQ ID NO: 298593 - DNA, 25 bp, probe
ttcactccaccaaatcttacaaatc

SEQ ID NO: 298594 - DNA, 25 bp, probe
ttcagggacactatattacaaatat

SEQ ID NO: 298595 - DNA, 25 bp, probe
ttcagaggcctcaattattaaggaa

SEQ ID NO: 298596 - DNA, 25 bp, probe
ttcatgatgaccccttacgtggtga

SEQ ID NO: 298597 - DNA, 25 bp, probe
ttcattgacctcaactacatggttt

SEQ ID NO: 298598 - DNA, 25 bp, probe
ttcagtgctccaaactattgttatc

SEQ ID NO: 298599 - DNA, 25 bp, probe
ttaatgcgctcaaacagttctcctc

SEQ ID NO: 298600 - DNA, 25 bp, probe
ttcaatgccaaatatgtctccctgc

SEQ ID NO: 298601 - DNA, 25 bp, probe
ttcaatctcaactttgtgcaccgtc

SEQ ID NO: 298602 - DNA, 25 bp, probe
ttcagttcaaatcctgtgcccttat

SEQ ID NO: 298603 - DNA, 25 bp, probe
ttcacttaaactttgtcacttctgc

SEQ ID NO: 298604 - DNA, 25 bp, probe
ttcactgttgaatgcctgtcccagt

SEQ ID NO: 298605 - DNA, 25 bp, probe
ttcttattataagctgttccagttc

SEQ ID NO: 298606 - DNA, 25 bp, probe
ttcttattataagctgttccagttc

SEQ ID NO: 298607 - DNA, 25 bp, probe
ttcttttaaaatttcctctgatact

SEQ ID NO: 298608 - DNA, 25 bp, probe
ttctctttttaatgtcgtctattgg

SEQ ID NO: 298609 - DNA, 25 bp, probe
ttcacttttatttcagtccttatat

SEQ ID NO: 298610 - DNA, 25 bp, probe
ttcacttttatttcagtccttatat

SEQ ID NO: 298611 - DNA, 25 bp, probe
ttcagttcttacacattccatctta

SEQ ID NO: 298612 - DNA, 25 bp, probe
ttcagtctctttgatgtggtcctta

SEQ ID NO: 298613 - DNA, 25 bp, probe
ttcagtttatcatcgttgactcttt

SEQ ID NO: 298614 - DNA, 25 bp, probe
ttcaatgttgactggtgggctcttg

SEQ ID NO: 298615 - DNA, 25 bp, probe
ttcatttgtatctggatctctgtta

SEQ ID NO: 298616 - DNA, 25 bp, probe
ttcttcgtgtctgcaggtctgagta

SEQ ID NO: 298617 - DNA, 25 bp, probe
ttcttcgtgtctgcaggtctgagta

SEQ ID NO: 298618 - DNA, 25 bp, probe
ttctacatggctcctgaagtctggg

SEQ ID NO: 298619 - DNA, 25 bp, probe
ttcagctgaggctctgagaactggt

SEQ ID NO: 298620 - DNA, 25 bp, probe
ttcacatagacatcttggagctgga

SEQ ID NO: 298621 - DNA, 25 bp, probe
ttcacatagacatcttggagctgga

SEQ ID NO: 298622 - DNA, 25 bp, probe
ttctaggacacctgtgcagggtccc

SEQ ID NO: 298623 - DNA, 25 bp, probe
ttcaagagacactgcttgggttcct

SEQ ID NO: 298624 - DNA, 25 bp, probe
ttaaggaaatcgactgggcccagct

SEQ ID NO: 298625 - DNA, 25 bp, probe
ttcaggaaaacggctgcggcctcgg

SEQ ID NO: 298626 - DNA, 25 bp, probe
ttcaggaacaagcgggcgctgctcg

SEQ ID NO: 298627 - DNA, 25 bp, probe
ttgcaggaaaatctggatccccagg

SEQ ID NO: 298628 - DNA, 25 bp, probe
ttcagggaacacgatggacctcaag

SEQ ID NO: 298629 - DNA, 25 bp, probe
ttgcagggagttggggccactgaac

SEQ ID NO: 298630 - DNA, 25 bp, probe
ttcagtggtgtgcggagtcctggca

SEQ ID NO: 298631 - DNA, 25 bp, probe
ttcagggttgcacagaatcctccaa

SEQ ID NO: 298632 - DNA, 25 bp, probe
ttcgcggtacagataacctgatcta

SEQ ID NO: 298633 - DNA, 25 bp, probe
ttccccttcagtaacattcgacctg

SEQ ID NO: 298634 - DNA, 25 bp, probe
ttccccttcagtaacattcgacctg

SEQ ID NO: 298635 - DNA, 25 bp, probe
ttccacttccagatcagtaaccctg

SEQ ID NO: 298636 - DNA, 25 bp, probe
ttcaccttgacgcttatgaacctct

SEQ ID NO: 298637 - DNA, 25 bp, probe
ttcactgctggctgccttagaacct

SEQ ID NO: 298638 - DNA, 25 bp, probe
ttcaggaggctcctgcgcaaaacct

SEQ ID NO: 298639 - DNA, 25 bp, probe
ttcaggaagtcttccagcaacccct

SEQ ID NO: 298640 - DNA, 25 bp, probe
ttcagtgaggtttccgagcctctcc

SEQ ID NO: 298641 - DNA, 25 bp, probe
ttcaggtggtgtgtcagagtctccc

SEQ ID NO: 298642 - DNA, 25 bp, probe
ttcagggaggtggagatgctgtacc

SEQ ID NO: 298643 - DNA, 25 bp, probe
ttccggcaagtgataggaaaccact

SEQ ID NO: 298644 - DNA, 25 bp, probe
ttccggcaagtgataggaaaccact

SEQ ID NO: 298645 - DNA, 25 bp, probe
ttccggcacatgaattgggacgacc

SEQ ID NO: 298646 - DNA, 25 bp, probe
ttcaggctgttgataaggtcgatct

SEQ ID NO: 298647 - DNA, 25 bp, probe
ttcagactttgaatgtactgttcta

SEQ ID NO: 298648 - DNA, 25 bp, probe
ttcaggctctggaaacctgttctga

SEQ ID NO: 298649 - DNA, 25 bp, probe
ttcatggtctgcacatccactgtgc

SEQ ID NO: 298650 - DNA, 25 bp, probe
ttcatagagctagaccagctgctgt

SEQ ID NO: 298651 - DNA, 25 bp, probe
ttcaaagcagatcaccattgcgatc

SEQ ID NO: 298652 - DNA, 25 bp, probe
ttcactgatggtcaggagcctgatc

SEQ ID NO: 298653 - DNA, 25 bp, probe
ttcactgatggtcaggagcctgatc

SEQ ID NO: 298654 - DNA, 25 bp, probe
ttcacagaagtgcctgagacgcgga

SEQ ID NO: 298655 - DNA, 25 bp, probe
ttcacgcacagcacgaatcgcatgt

SEQ ID NO: 298656 - DNA, 25 bp, probe
ttcaccaccataaaacccttgagca

SEQ ID NO: 298657 - DNA, 25 bp, probe
ttcaccttctaaaaactcatgtgca

SEQ ID NO: 298658 - DNA, 25 bp, probe
ttcaccgttgatacagaaatctgca

SEQ ID NO: 298659 - DNA, 25 bp, probe
ttgaccggtacattgcaatttgcaa

SEQ ID NO: 298660 - DNA, 25 bp, probe
ttcaccgcgatcttaaatgtgacaa

SEQ ID NO: 298661 - DNA, 25 bp, probe
ttcactgacaactttaagatatcaa

SEQ ID NO: 298662 - DNA, 25 bp, probe
ttcgtgaacacattcttggtaaaga

SEQ ID NO: 298663 - DNA, 25 bp, probe
ttcgtgaacacattcttggtaaaga

SEQ ID NO: 298664 - DNA, 25 bp, probe
ttcagggtcaaatttgagcaaactg

SEQ ID NO: 298665 - DNA, 25 bp, probe
ttcagggtcaaaattcagtgatagt

SEQ ID NO: 298666 - DNA, 25 bp, probe
ttcaagaggaacatatgcctgagaa

SEQ ID NO: 298667 - DNA, 25 bp, probe
ttaattgataacaacatcactacaa

SEQ ID NO: 298668 - DNA, 25 bp, probe
ttcaggcttatgtcttcacactact

SEQ ID NO: 298669 - DNA, 25 bp, probe
ttccctgttatctcacactgaatct

SEQ ID NO: 298670 - DNA, 25 bp, probe
ttcttcgttgttcccaagtcatgta

SEQ ID NO: 298671 - DNA, 25 bp, probe
ttcttcgaaatctcaaagatcatgg

SEQ ID NO: 298672 - DNA, 25 bp, probe
ttcatcctgaaccggaatgaccagg

SEQ ID NO: 298673 - DNA, 25 bp, probe
ttcaccttaccactgacaggtcgtg

SEQ ID NO: 298674 - DNA, 25 bp, probe
ttcaccccggcacccaggggtggat

SEQ ID NO: 298675 - DNA, 25 bp, probe
ttcccagcttggtcctcagtgggtt

SEQ ID NO: 298676 - DNA, 25 bp, probe
ttctccacaaaggccctggtggttt

SEQ ID NO: 298677 - DNA, 25 bp, probe
ttcttcatctaagccttctggtttt

SEQ ID NO: 298678 - DNA, 25 bp, probe
ttcttgattagaggtttgggcatat

SEQ ID NO: 298679 - DNA, 25 bp, probe
ttcttgtgtagcgttcttaggaatc

SEQ ID NO: 298680 - DNA, 25 bp, probe
ttcattttgatggcttctatttttg

SEQ ID NO: 298681 - DNA, 25 bp, probe
ttcattatacatggcttcttttatg

SEQ ID NO: 298682 - DNA, 25 bp, probe
ttcttatcactgtattttcgtaaac

SEQ ID NO: 298683 - DNA, 25 bp, probe
ttcaatatacgttcttcagggtcaa

SEQ ID NO: 298684 - DNA, 25 bp, probe
ttcaatatacgttcttcagggtcaa

SEQ ID NO: 298685 - DNA, 25 bp, probe
ttcaaatccagtttctcaggtgaaa

SEQ ID NO: 298686 - DNA, 25 bp, probe
ttcaaattcagttactcaccatgga

SEQ ID NO: 298687 - DNA, 25 bp, probe
ttcaactaagtgtactcagtgcaga

SEQ ID NO: 298688 - DNA, 25 bp, probe
ttcaagtctagtcgagcaagctcag

SEQ ID NO: 298689 - DNA, 25 bp, probe
ttcaagcacgagatgcagcatttcg

SEQ ID NO: 298690 - DNA, 25 bp, probe
ttcacagcacaaactcatctttaca

SEQ ID NO: 298691 - DNA, 25 bp, probe
ttcacagcagattaccatttattac

SEQ ID NO: 298692 - DNA, 25 bp, probe
ttcacagcagtttattaatgtatat

SEQ ID NO: 298693 - DNA, 25 bp, probe
ttcactgttcagtttagcattaaaa

SEQ ID NO: 298694 - DNA, 25 bp, probe
ttcacgttcgttgagtgtaagcaat

SEQ ID NO: 298695 - DNA, 25 bp, probe
ttcaagttcatgagcctggaaagaa

SEQ ID NO: 298696 - DNA, 25 bp, probe
ttccaatctggtcgcctgggaaaca

SEQ ID NO: 298697 - DNA, 25 bp, probe
ttcaaatcgcttttctggctgacta

SEQ ID NO: 298698 - DNA, 25 bp, probe
ttcctatggccttttggtagcaact

SEQ ID NO: 298699 - DNA, 25 bp, probe
ttcacatatgtcctcaagggccaca

SEQ ID NO: 298700 - DNA, 25 bp, probe
ttcacatcctgcctaagaggcacta

SEQ ID NO: 298701 - DNA, 25 bp, probe
ttcagcatcgcggatgaagacgcac

SEQ ID NO: 298702 - DNA, 25 bp, probe
ttcagccgctattgcaagatgccca

SEQ ID NO: 298703 - DNA, 25 bp, probe
ttcggccttagttatgccaaaaatg

SEQ ID NO: 298704 - DNA, 25 bp, probe
ttctggttttgtttgccaatgagca

SEQ ID NO: 298705 - DNA, 25 bp, probe
ttctttagatgtcgtatccggagag

SEQ ID NO: 298706 - DNA, 25 bp, probe
ttcttttggtccttcctggaatgaa

SEQ ID NO: 298707 - DNA, 25 bp, probe
ttcttcggggaactcctggaaatat

SEQ ID NO: 298708 - DNA, 25 bp, probe
ttcttcagggagtgtcacctcaaat

SEQ ID NO: 298709 - DNA, 25 bp, probe
ttcctgtggaggtggctttcagaag

SEQ ID NO: 298710 - DNA, 25 bp, probe
ttcacgggggagggttgtattcagt

SEQ ID NO: 298711 - DNA, 25 bp, probe
ttcacgcggggggtgggggtcagat

SEQ ID NO: 298712 - DNA, 25 bp, probe
ttccggggagaagtgaggacgtcac

SEQ ID NO: 298713 - DNA, 25 bp, probe
ttcttggggacgtatgtggccgtct

SEQ ID NO: 298714 - DNA, 25 bp, probe
ttcttagagggacaagtggcgttca

SEQ ID NO: 298715 - DNA, 25 bp, probe
ttcttcaggggacgattctgtgttt

SEQ ID NO: 298716 - DNA, 25 bp, probe
ttgcttcaaaaacattcttacattt

SEQ ID NO: 298717 - DNA, 25 bp, probe
ttgttcagaattccaagttcaacat

SEQ ID NO: 298718 - DNA, 25 bp, probe
ttgttcagaattccaagttcaacat

SEQ ID NO: 298719 - DNA, 25 bp, probe
ttcgaagagcatgtgaagttacaat

SEQ ID NO: 298720 - DNA, 25 bp, probe
ttcgcacgagtagtgggtcgtcttg

SEQ ID NO: 298721 - DNA, 25 bp, probe
ttcgcacgagtagtgggtcgtcttg

SEQ ID NO: 298722 - DNA, 25 bp, probe
ttcagcagccagagtggggagactg

SEQ ID NO: 298723 - DNA, 25 bp, probe
ttcagcccagcacggagaggacatc

SEQ ID NO: 298724 - DNA, 25 bp, probe
ttcatcccagaagggtggatacccc

SEQ ID NO: 298725 - DNA, 25 bp, probe
ttcaaccagatccctggcaattccc

SEQ ID NO: 298726 - DNA, 25 bp, probe
ttcaaccagatccctggcaattccc

SEQ ID NO: 298727 - DNA, 25 bp, probe
ttcataaagatcttgtggcaactac

SEQ ID NO: 298728 - DNA, 25 bp, probe
ttcatcaaggtgttgggcaaaggca

SEQ ID NO: 298729 - DNA, 25 bp, probe
ttgatgccggtgaacgtgcaaaaca

SEQ ID NO: 298730 - DNA, 25 bp, probe
ttcatgccactgaatacgttgaaaa

SEQ ID NO: 298731 - DNA, 25 bp, probe
ttcatgagcctggaaagaatcaaaa

SEQ ID NO: 298732 - DNA, 25 bp, probe
ttcatgaccccaaagaatcacacca

SEQ ID NO: 298733 - DNA, 25 bp, probe
ttcagcatttccaacaggatcacag

SEQ ID NO: 298734 - DNA, 25 bp, probe
ttcacatgatttcagggatcatgca

SEQ ID NO: 298735 - DNA, 25 bp, probe
ttcactgcattttgcatgggatgaa

SEQ ID NO: 298736 - DNA, 25 bp, probe
ttcaagatcatttcaggtgagcagt

SEQ ID NO: 298737 - DNA, 25 bp, probe
ttcaaggcctgttggagcacactgc

SEQ ID NO: 298738 - DNA, 25 bp, probe
ttcagcatcagcatgttggacacac

SEQ ID NO: 298739 - DNA, 25 bp, probe
ttcagcatcagcatgttggacacac

SEQ ID NO: 298740 - DNA, 25 bp, probe
ttcgatcgcatgttccagatctatc

SEQ ID NO: 298741 - DNA, 25 bp, probe
ttcagaagcatgatcctgacctcac

SEQ ID NO: 298742 - DNA, 25 bp, probe
ttcaaccatttgctgacccaataaa

SEQ ID NO: 298743 - DNA, 25 bp, probe
ttcacacctgttctgaatccagcat

SEQ ID NO: 298744 - DNA, 25 bp, probe
ttcatccgggaggtcaatgccatgc

SEQ ID NO: 298745 - DNA, 25 bp, probe
ttcatacagcggtgtctcagacact

SEQ ID NO: 298746 - DNA, 25 bp, probe
ttcatacagcggtgtctcagacact

SEQ ID NO: 298747 - DNA, 25 bp, probe
ttcttctatggatgtctcaaccggc

SEQ ID NO: 298748 - DNA, 25 bp, probe
ttcattcgatgagacctgtacccga

SEQ ID NO: 298749 - DNA, 25 bp, probe
ttcattcgagatgctctctcaacct

SEQ ID NO: 298750 - DNA, 25 bp, probe
ttcatctgcgagagccgcttcatgc

SEQ ID NO: 298751 - DNA, 25 bp, probe
ttcatccgagatcagcagcaattgc

SEQ ID NO: 298752 - DNA, 25 bp, probe
ttcacaacacagcagcacacacagc

SEQ ID NO: 298753 - DNA, 25 bp, probe
ttcacagagacctagcagcacgcaa

SEQ ID NO: 298754 - DNA, 25 bp, probe
ttcacactggtttgccaggccaatg

SEQ ID NO: 298755 - DNA, 25 bp, probe
ttcacatctggttagggggcagatt

SEQ ID NO: 298756 - DNA, 25 bp, probe
ttcacagcagccttatggagggaaa

SEQ ID NO: 298757 - DNA, 25 bp, probe
ttcacagcagccttatggagggaaa

SEQ ID NO: 298758 - DNA, 25 bp, probe
ttcagccagtcttgctggcagtgga

SEQ ID NO: 298759 - DNA, 25 bp, probe
ttcagccagtcttgctggcagtgga

SEQ ID NO: 298760 - DNA, 25 bp, probe
ttcagctcagctgggcatggagtta

SEQ ID NO: 298761 - DNA, 25 bp, probe
ttcagctcagctgggcatggagtta

SEQ ID NO: 298762 - DNA, 25 bp, probe
ttctctatgtagtctggcagtataa

SEQ ID NO: 298763 - DNA, 25 bp, probe
ttcataatcaagtttgctttgcaaa

SEQ ID NO: 298764 - DNA, 25 bp, probe
ttcagaaagagctcactatcatcaa

SEQ ID NO: 298765 - DNA, 25 bp, probe
ttcagtattgagcaactctatcaga

SEQ ID NO: 298766 - DNA, 25 bp, probe
ttcatgtatccctgttactgatagg

SEQ ID NO: 298767 - DNA, 25 bp, probe
ttcatgtatccctgttactgatagg

SEQ ID NO: 298768 - DNA, 25 bp, probe
ttcatgtacccaggcaacaagaaga

SEQ ID NO: 298769 - DNA, 25 bp, probe
ttcagtcatctccaaaaacagtaaa

SEQ ID NO: 298770 - DNA, 25 bp, probe
ttcagctattgggaattacattcaa

SEQ ID NO: 298771 - DNA, 25 bp, probe
ttcagtatttgtaatttttcaagtc

SEQ ID NO: 298772 - DNA, 25 bp, probe
ttcagcctttttcttgttctgttct

SEQ ID NO: 298773 - DNA, 25 bp, probe
ttcagcgttttgtttctttctgtcc

SEQ ID NO: 298774 - DNA, 25 bp, probe
ttcggccttatacatctggtcttac

SEQ ID NO: 298775 - DNA, 25 bp, probe
ttctcctttagacagtgggcattaa

SEQ ID NO: 298776 - DNA, 25 bp, probe
ttctcctttagacagtgggcattaa

SEQ ID NO: 298777 - DNA, 25 bp, probe
ttcccaccaatgccacgggacattc

SEQ ID NO: 298778 - DNA, 25 bp, probe
ttcccaccaatgccacgggacattc

SEQ ID NO: 298779 - DNA, 25 bp, probe
ttcctcctatatcctcagtaacaac

SEQ ID NO: 298780 - DNA, 25 bp, probe
ttcacctggctaggctatttaaact

SEQ ID NO: 298781 - DNA, 25 bp, probe
ttcagctacttcggcttcttaaacc

SEQ ID NO: 298782 - DNA, 25 bp, probe
ttcactctttcttctttgtaaacca

SEQ ID NO: 298783 - DNA, 25 bp, probe
ttcagactgttttttttaaatacat

SEQ ID NO: 298784 - DNA, 25 bp, probe
ttcacctgtcttaagattaaataaa

SEQ ID NO: 298785 - DNA, 25 bp, probe
ttcacatttctaaatttaacagaga

SEQ ID NO: 298786 - DNA, 25 bp, probe
ttcacttaatgtttcttagagccaa

SEQ ID NO: 298787 - DNA, 25 bp, probe
ttcagttttccattctgtggcacca

SEQ ID NO: 298788 - DNA, 25 bp, probe
ttcagttttccattctgtggcacca

SEQ ID NO: 298789 - DNA, 25 bp, probe
ttcagtttcattttttctcatccca

SEQ ID NO: 298790 - DNA, 25 bp, probe
ttcgtttcaattgttggatctcttg

SEQ ID NO: 298791 - DNA, 25 bp, probe
ttctgttggaatcttaggaactaga

SEQ ID NO: 298792 - DNA, 25 bp, probe
ttctttggcactcttactgcctgta

SEQ ID NO: 298793 - DNA, 25 bp, probe
ttcatttctgcacagttaagtttat

SEQ ID NO: 298794 - DNA, 25 bp, probe
ttctctttcagtattaaactctcct

SEQ ID NO: 298795 - DNA, 25 bp, probe
ttctctttcaaagctaaattccaca

SEQ ID NO: 298796 - DNA, 25 bp, probe
ttcttctacaactggtacttcctca

SEQ ID NO: 298797 - DNA, 25 bp, probe
ttcttctacaactggtacttcctca

SEQ ID NO: 298798 - DNA, 25 bp, probe
ttctttcaaaatcctttttcgatca

SEQ ID NO: 298799 - DNA, 25 bp, probe
ttctttctaaattgctgttccttaa

SEQ ID NO: 298800 - DNA, 25 bp, probe
ttcattgttacgtcacttttctata

SEQ ID NO: 298801 - DNA, 25 bp, probe
ttcaggcttaggtccattctcctaa

SEQ ID NO: 298802 - DNA, 25 bp, probe
ttcagtgctttggcaccttcatcac

SEQ ID NO: 298803 - DNA, 25 bp, probe
ttcagtgttgtggccctagctatgg

SEQ ID NO: 298804 - DNA, 25 bp, probe
ttcgatgacccgcgtcgttggcggg

SEQ ID NO: 298805 - DNA, 25 bp, probe
ttggaacctcgaaacgtcttgcggg

SEQ ID NO: 298806 - DNA, 25 bp, probe
ttgggacctccgcactgggaggagg

SEQ ID NO: 298807 - DNA, 25 bp, probe
ttgggtttggccagggaggcgcagg

SEQ ID NO: 298808 - DNA, 25 bp, probe
ttcggtgctggagccgggagtctga

SEQ ID NO: 298809 - DNA, 25 bp, probe
ttcacaggggacccgttgatatctg

SEQ ID NO: 298810 - DNA, 25 bp, probe
ttcacacggcagacgccggtggaca

SEQ ID NO: 298811 - DNA, 25 bp, probe
ttcacacggcagacgccggtggaca

SEQ ID NO: 298812 - DNA, 25 bp, probe
ttcacacggcagacgccggtggaca

SEQ ID NO: 298813 - DNA, 25 bp, probe
ttcatcaagcggtccgaggtggaag

SEQ ID NO: 298814 - DNA, 25 bp, probe
ttcatcaagcggtccgaggtggaag

SEQ ID NO: 298815 - DNA, 25 bp, probe
ttcaccagcaagtcggatgtctgga

SEQ ID NO: 298816 - DNA, 25 bp, probe
ttcaacagaagctgtgctgccacgg

SEQ ID NO: 298817 - DNA, 25 bp, probe
ttcaacatcaacttctacgcaggag

SEQ ID NO: 298818 - DNA, 25 bp, probe
ttgaaaaacttcactgcccagaagc

SEQ ID NO: 298819 - DNA, 25 bp, probe
ttcaaaatttttagtgctccctaca

SEQ ID NO: 298820 - DNA, 25 bp, probe
ttcaaaatttttagtgctccctaca

SEQ ID NO: 298821 - DNA, 25 bp, probe
ttcgacgattttatgatgccttttc

SEQ ID NO: 298822 - DNA, 25 bp, probe
ttctgccgtttttcatagttttcac

SEQ ID NO: 298823 - DNA, 25 bp, probe
ttctgccgtttttcatagttttcac

SEQ ID NO: 298824 - DNA, 25 bp, probe
ttcttcagttttcttttcttgcact

SEQ ID NO: 298825 - DNA, 25 bp, probe
ttcttcgttgctgcattttcttcac

SEQ ID NO: 298826 - DNA, 25 bp, probe
ttctacatattcaacgtttcttccg

SEQ ID NO: 298827 - DNA, 25 bp, probe
ttcagcaaattccagatttgtttcc

SEQ ID NO: 298828 - DNA, 25 bp, probe
ttcatgataccttcagatttatctt

SEQ ID NO: 298829 - DNA, 25 bp, probe
ttcttactgctttatagtgacttga

SEQ ID NO: 298830 - DNA, 25 bp, probe
ttcagtaggctttatgctgtgttta

SEQ ID NO: 298831 - DNA, 25 bp, probe
ttcacgggagatttcttgttgctca

SEQ ID NO: 298832 - DNA, 25 bp, probe
ttcacctgtgagattctggctgttc

SEQ ID NO: 298833 - DNA, 25 bp, probe
ttcacctgtgagattctggctgttc

SEQ ID NO: 298834 - DNA, 25 bp, probe
ttcactctggtgaaactgttcctct

SEQ ID NO: 298835 - DNA, 25 bp, probe
ttcgactgcagtcgaaccttgcctc

SEQ ID NO: 298836 - DNA, 25 bp, probe
ttcagaccacagacaacctgctccc

SEQ ID NO: 298837 - DNA, 25 bp, probe
ttcatgattcctacaaatcctcctc

SEQ ID NO: 298838 - DNA, 25 bp, probe
ttcatgggcccaaggtcctacatgt

SEQ ID NO: 298839 - DNA, 25 bp, probe
ttcagtgtcccaaatggcctaaccc

SEQ ID NO: 298840 - DNA, 25 bp, probe
ttctgtgtaccaggttgcctaaatc

SEQ ID NO: 298841 - DNA, 25 bp, probe
ttctggtgaccagcagcggacaaat

SEQ ID NO: 298842 - DNA, 25 bp, probe
ttcacgcgctccacagtggacacta

SEQ ID NO: 298843 - DNA, 25 bp, probe
ttcatctccatcgtggactgggcac

SEQ ID NO: 298844 - DNA, 25 bp, probe
ttcatcttatttagcactggagcaa

SEQ ID NO: 298845 - DNA, 25 bp, probe
ttcagttctgcagttgcactagcca

SEQ ID NO: 298846 - DNA, 25 bp, probe
ttcagttctgtggtgcatctgagcc

SEQ ID NO: 298847 - DNA, 25 bp, probe
ttcatattgatgtgtgtctaggcag

SEQ ID NO: 298848 - DNA, 25 bp, probe
ttcatattgaggctgcagctagaaa

SEQ ID NO: 298849 - DNA, 25 bp, probe
ttcataagatgtctgctgcccacaa

SEQ ID NO: 298850 - DNA, 25 bp, probe
ttcttacatgttttcctctcgaaag

SEQ ID NO: 298851 - DNA, 25 bp, probe
ttcttacatgttttcctctcgaaag

SEQ ID NO: 298852 - DNA, 25 bp, probe
ttctctccagtttctaccataatta

SEQ ID NO: 298853 - DNA, 25 bp, probe
ttcttcggtgagaccaaccaatgta

SEQ ID NO: 298854 - DNA, 25 bp, probe
ttcacagggctcaccatacacaagt

SEQ ID NO: 298855 - DNA, 25 bp, probe
ttcagcaagttcacctccaagtttg

SEQ ID NO: 298856 - DNA, 25 bp, probe
ttcagcaagttcacctccaagtttg

SEQ ID NO: 298857 - DNA, 25 bp, probe
ttcaaaattgcgagtccatgagttt

SEQ ID NO: 298858 - DNA, 25 bp, probe
ttcagaatattggtggcatcttcat

SEQ ID NO: 298859 - DNA, 25 bp, probe
ttcacaatttcaaggtgcatacatt

SEQ ID NO: 298860 - DNA, 25 bp, probe
ttcagagataccaatgggcattgct

SEQ ID NO: 298861 - DNA, 25 bp, probe
ttctgaatcactgttgagttctgat

SEQ ID NO: 298862 - DNA, 25 bp, probe
ttcaggatccccgtggattctgcta

SEQ ID NO: 298863 - DNA, 25 bp, probe
ttcaaagcccccgataatcgctctt

SEQ ID NO: 298864 - DNA, 25 bp, probe
ttcaccaccacctgataatgggtat

SEQ ID NO: 298865 - DNA, 25 bp, probe
ttcacacctcaggctcgtggtggtg

SEQ ID NO: 298866 - DNA, 25 bp, probe
ttcagtctccaggtgattggatgtg

SEQ ID NO: 298867 - DNA, 25 bp, probe
ttgcagtgcattgcgttgtggaatt

SEQ ID NO: 298868 - DNA, 25 bp, probe
ttcagtgtgtcaccattttaattgg

SEQ ID NO: 298869 - DNA, 25 bp, probe
ttcctgttgggcttttagctctgtg

SEQ ID NO: 298870 - DNA, 25 bp, probe
ttgcctgatgggtgtttacttgttc

SEQ ID NO: 298871 - DNA, 25 bp, probe
ttcgtgaaggcttttgttctttctc

SEQ ID NO: 298872 - DNA, 25 bp, probe
ttctggtagtgtcttttcttttaca

SEQ ID NO: 298873 - DNA, 25 bp, probe
ttctcctctttgattttgtttttct

SEQ ID NO: 298874 - DNA, 25 bp, probe
ttcccttctgtgatgaattctttca

SEQ ID NO: 298875 - DNA, 25 bp, probe
ttcaccttccgaaggttctttgatg

SEQ ID NO: 298876 - DNA, 25 bp, probe
ttcttgttcacaaagtgtttttctg

SEQ ID NO: 298877 - DNA, 25 bp, probe
ttcttgataaatgactgtttttttc

SEQ ID NO: 298878 - DNA, 25 bp, probe
ttctgttcaggatacttttgtttta

SEQ ID NO: 298879 - DNA, 25 bp, probe
ttctgttcaggatacttttgtttta

SEQ ID NO: 298880 - DNA, 25 bp, probe
ttctttcagctgcaggctttgagtt

SEQ ID NO: 298881 - DNA, 25 bp, probe
ttctttaccagatgctttgtggtat

SEQ ID NO: 298882 - DNA, 25 bp, probe
ttcttccttcagacggttttggatc

SEQ ID NO: 298883 - DNA, 25 bp, probe
ttcctcactttgatgttgttttgca

SEQ ID NO: 298884 - DNA, 25 bp, probe
ttcctcactttgatgttgttttgca

SEQ ID NO: 298885 - DNA, 25 bp, probe
ttcttcaccttgacgcttatgaacc

SEQ ID NO: 298886 - DNA, 25 bp, probe
ttcttcactgctggagggaatggaa

SEQ ID NO: 298887 - DNA, 25 bp, probe
ttcttccagcatactggtggaggaa

SEQ ID NO: 298888 - DNA, 25 bp, probe
ttcactgtagctattggggcagaga

SEQ ID NO: 298889 - DNA, 25 bp, probe
ttcacttacctcattgggagagaag

SEQ ID NO: 298890 - DNA, 25 bp, probe
ttcactctgagtgttttatgagaaa

SEQ ID NO: 298891 - DNA, 25 bp, probe
ttcactctgagtgttttatgagaaa

SEQ ID NO: 298892 - DNA, 25 bp, probe
ttcagctcgagtacttgtctgtgga

SEQ ID NO: 298893 - DNA, 25 bp, probe
ttcagctcgagtacttgtctgtgga

SEQ ID NO: 298894 - DNA, 25 bp, probe
ttcaccgattttacctgcatggcac

SEQ ID NO: 298895 - DNA, 25 bp, probe
ttcgccagtcaactacgcgaggcag

SEQ ID NO: 298896 - DNA, 25 bp, probe
ttcttcgtcaatcccggggaggatg

SEQ ID NO: 298897 - DNA, 25 bp, probe
ttcttccatcctgccggatgagtgt

SEQ ID NO: 298898 - DNA, 25 bp, probe
ttcttcgacatcgccgtcgatggtg

SEQ ID NO: 298899 - DNA, 25 bp, probe
ttcttgcccatcgctttggaggtaa

SEQ ID NO: 298900 - DNA, 25 bp, probe
ttcttcctgcttatatttaggaaca

SEQ ID NO: 298901 - DNA, 25 bp, probe
ttcttttgcccacacttgggagcaa

SEQ ID NO: 298902 - DNA, 25 bp, probe
ttctcaaattccccagcttgggaaa

SEQ ID NO: 298903 - DNA, 25 bp, probe
ttgacaaaacctaacttgcgcagaa

SEQ ID NO: 298904 - DNA, 25 bp, probe
ttgaaaaaactggagtcagaagacc

SEQ ID NO: 298905 - DNA, 25 bp, probe
ttgatagttaccggaacgaaatagc

SEQ ID NO: 298906 - DNA, 25 bp, probe
ttcatggttaccgtatacagttgat

SEQ ID NO: 298907 - DNA, 25 bp, probe
ttctaattaccagtatatcagagga

SEQ ID NO: 298908 - DNA, 25 bp, probe
ttgctgccatttccagttatcgagc

SEQ ID NO: 298909 - DNA, 25 bp, probe
ttcatgccatttccattgttgagtg

SEQ ID NO: 298910 - DNA, 25 bp, probe
ttcagcctgtctgtgattgctgcgg

SEQ ID NO: 298911 - DNA, 25 bp, probe
ttcagcctgtctgtgattgctgcgg

SEQ ID NO: 298912 - DNA, 25 bp, probe
ttcagtgttgtgtatgtgtctgggt

SEQ ID NO: 298913 - DNA, 25 bp, probe
ttcagtgttgtggtgactcagggcc

SEQ ID NO: 298914 - DNA, 25 bp, probe
ttcagtctctgtgtaatcatctgaa

SEQ ID NO: 298915 - DNA, 25 bp, probe
ttcacactctgcattacagtctgaa

SEQ ID NO: 298916 - DNA, 25 bp, probe
ttcagctctgccagtgacgtgtgga

SEQ ID NO: 298917 - DNA, 25 bp, probe
ttcagctatgctctgtgtctgtggg

SEQ ID NO: 298918 - DNA, 25 bp, probe
ttcatgccatggcctgtggatggag

SEQ ID NO: 298919 - DNA, 25 bp, probe
ttcatccaggcccaactgtgagcaa

SEQ ID NO: 298920 - DNA, 25 bp, probe
ttcatccgcagcacacactgggaat

SEQ ID NO: 298921 - DNA, 25 bp, probe
ttcattccatgcaagatgactggaa

SEQ ID NO: 298922 - DNA, 25 bp, probe
ttcattccatgcaagatgactggaa

SEQ ID NO: 298923 - DNA, 25 bp, probe
ttcttccatggggcgtggcaaggga

SEQ ID NO: 298924 - DNA, 25 bp, probe
ttcttccggaggatcgactgggaaa

SEQ ID NO: 298925 - DNA, 25 bp, probe
ttctaccgtggaatgtccctggagt

SEQ ID NO: 298926 - DNA, 25 bp, probe
ttctaccgtggaatgtccctggagt

SEQ ID NO: 298927 - DNA, 25 bp, probe
ttctaccgtggaatgtccctggagt

SEQ ID NO: 298928 - DNA, 25 bp, probe
ttctaccgtggaatgtccctggagt

SEQ ID NO: 298929 - DNA, 25 bp, probe
ttctaccgtggaatgtccctggagt

SEQ ID NO: 298930 - DNA, 25 bp, probe
ttctcccaggtaatccgggaaggag

SEQ ID NO: 298931 - DNA, 25 bp, probe
ttctcggaggtgatcctggcagaag

SEQ ID NO: 298932 - DNA, 25 bp, probe
ttcacaagtggtttccatggagata

SEQ ID NO: 298933 - DNA, 25 bp, probe
ttccaacttgtgttctcagtgcagt

SEQ ID NO: 298934 - DNA, 25 bp, probe
ttctgcccttgtatctttgcagtca

SEQ ID NO: 298935 - DNA, 25 bp, probe
ttcaccaccatttcagtttcaggca

SEQ ID NO: 298936 - DNA, 25 bp, probe
ttcaggacttggtctgatttcagga

SEQ ID NO: 298937 - DNA, 25 bp, probe
ttcagtacctgggctctgtttcaga

SEQ ID NO: 298938 - DNA, 25 bp, probe
ttcagtacctgggctctgtttcaga

SEQ ID NO: 298939 - DNA, 25 bp, probe
ttcagtattgctgtccgcttctaga

SEQ ID NO: 298940 - DNA, 25 bp, probe
ttcacttgtcattctactttctata

SEQ ID NO: 298941 - DNA, 25 bp, probe
ttcacatggtctttgccttttgttg

SEQ ID NO: 298942 - DNA, 25 bp, probe
ttcacatggcttttctttcaatctt

SEQ ID NO: 298943 - DNA, 25 bp, probe
ttcactcaatattttcctgagattt

SEQ ID NO: 298944 - DNA, 25 bp, probe
ttcacggtgatattccacaagattt

SEQ ID NO: 298945 - DNA, 25 bp, probe
ttcacatggaaatccaaatgtctgg

SEQ ID NO: 298946 - DNA, 25 bp, probe
ttcacatggaaatccaaatgtctgg

SEQ ID NO: 298947 - DNA, 25 bp, probe
ttcagctgctgacaatcctatttag

SEQ ID NO: 298948 - DNA, 25 bp, probe
ttgccagtgactagtccatgtcttc

SEQ ID NO: 298949 - DNA, 25 bp, probe
ttcagcagttgctagtccattctcc

SEQ ID NO: 298950 - DNA, 25 bp, probe
ttcatcgataaagccaagctctcca

SEQ ID NO: 298951 - DNA, 25 bp, probe
ttcacgtaaatgccaaccatctaca

SEQ ID NO: 298952 - DNA, 25 bp, probe
ttcacagtgatcttaaaccagctaa

SEQ ID NO: 298953 - DNA, 25 bp, probe
ttcactgtgtcttaccaagcaggac

SEQ ID NO: 298954 - DNA, 25 bp, probe
ttcactctctttaaagagatggagc

SEQ ID NO: 298955 - DNA, 25 bp, probe
ttcattcctaataaaggcaggctga

SEQ ID NO: 298956 - DNA, 25 bp, probe
ttcacttcttcaaagcaggacctat

SEQ ID NO: 298957 - DNA, 25 bp, probe
ttcctctctacttggggaaatcagg

SEQ ID NO: 298958 - DNA, 25 bp, probe
ttcctccccttctctgaaatgggta

SEQ ID NO: 298959 - DNA, 25 bp, probe
ttcttcacccttttgtcaaattgtt

SEQ ID NO: 298960 - DNA, 25 bp, probe
ttcttacttgttactgtagtgttta

SEQ ID NO: 298961 - DNA, 25 bp, probe
ttgcttacttttgtatactgtattt

SEQ ID NO: 298962 - DNA, 25 bp, probe
ttgcttacttttgtatactgtattt

SEQ ID NO: 298963 - DNA, 25 bp, probe
ttcgaactttgggctactctgttta

SEQ ID NO: 298964 - DNA, 25 bp, probe
ttcgaactttgggctactctgttta

SEQ ID NO: 298965 - DNA, 25 bp, probe
ttcagcctctaaacctactctgtat

SEQ ID NO: 298966 - DNA, 25 bp, probe
ttcagcctctaaacctactctgtat

SEQ ID NO: 298967 - DNA, 25 bp, probe
ttcaccaggagaatgtgcaacttta

SEQ ID NO: 298968 - DNA, 25 bp, probe
ttcctcaggtcattgccaaccttac

SEQ ID NO: 298969 - DNA, 25 bp, probe
ttctatggagtggtgtcacccatgt

SEQ ID NO: 298970 - DNA, 25 bp, probe
ttctatggagtggtgactccctcac

SEQ ID NO: 298971 - DNA, 25 bp, probe
ttcttcatcatgtggagccccatca

SEQ ID NO: 298972 - DNA, 25 bp, probe
ttcttcgagctatgggccttcagga

SEQ ID NO: 298973 - DNA, 25 bp, probe
ttcttgtgcacgcgggcatttgcag

SEQ ID NO: 298974 - DNA, 25 bp, probe
ttctttctatgcttggtctgactga

SEQ ID NO: 298975 - DNA, 25 bp, probe
ttctttctatgaatgtacaagggtt

SEQ ID NO: 298976 - DNA, 25 bp, probe
ttctttctatgaatgtacaagggtt

SEQ ID NO: 298977 - DNA, 25 bp, probe
ttctcttctttattgcactaggaat

SEQ ID NO: 298978 - DNA, 25 bp, probe
ttctttcttccaatgccagcatgaa

SEQ ID NO: 298979 - DNA, 25 bp, probe
ttcttctactgcgacatgctcaaga

SEQ ID NO: 298980 - DNA, 25 bp, probe
ttcttctactgcgacatgctcaaga

SEQ ID NO: 298981 - DNA, 25 bp, probe
ttctttacatctccagcatcaacga

SEQ ID NO: 298982 - DNA, 25 bp, probe
ttcttaacattgcagcaatcacctg

SEQ ID NO: 298983 - DNA, 25 bp, probe
ttcatcatgaccagaagcttgacgc

SEQ ID NO: 298984 - DNA, 25 bp, probe
ttctctgacacaaactgttcaccca

SEQ ID NO: 298985 - DNA, 25 bp, probe
ttcttgtacacaacgtttccactgc

SEQ ID NO: 298986 - DNA, 25 bp, probe
ttcttgttaatccttctttcctgga

SEQ ID NO: 298987 - DNA, 25 bp, probe
ttcttttacatggcttctttaatga

SEQ ID NO: 298988 - DNA, 25 bp, probe
ttcttttacatggcttctttaatga

SEQ ID NO: 298989 - DNA, 25 bp, probe
ttctttgtacagagaccttacatgt

SEQ ID NO: 298990 - DNA, 25 bp, probe
ttccttgttggtcagccttatagca

SEQ ID NO: 298991 - DNA, 25 bp, probe
ttcagcttttagagcaggtgtatga

SEQ ID NO: 298992 - DNA, 25 bp, probe
ttcatgcttttatcaagagatctga

SEQ ID NO: 298993 - DNA, 25 bp, probe
ttcctatgtgtctccagaattgcaa

SEQ ID NO: 298994 - DNA, 25 bp, probe
ttcttatgagtctcactagattgac

SEQ ID NO: 298995 - DNA, 25 bp, probe
ttcattagacgctgctgctggtatg

SEQ ID NO: 298996 - DNA, 25 bp, probe
ttcatgctagagctaatgggagatg

SEQ ID NO: 298997 - DNA, 25 bp, probe
ttcattatgcagctaaggaaggaca

SEQ ID NO: 298998 - DNA, 25 bp, probe
ttcatctggggttggcaacaggaca

SEQ ID NO: 298999 - DNA, 25 bp, probe
ttcatcgggacttggcagccagaaa

SEQ ID NO: 299000 - DNA, 25 bp, probe
ttcctggcagtctcagtccaaaagt

SEQ ID NO: 299001 - DNA, 25 bp, probe
ttccgccgtggtttccaagaagctt

SEQ ID NO: 299002 - DNA, 25 bp, probe
ttccctttagaacttcaagatttct

SEQ ID NO: 299003 - DNA, 25 bp, probe
ttcaccattctagatgccatcaaga

SEQ ID NO: 299004 - DNA, 25 bp, probe
ttcaccatcacaactgcattaccaa

SEQ ID NO: 299005 - DNA, 25 bp, probe
ttctgcgatcagattatcatcacca

SEQ ID NO: 299006 - DNA, 25 bp, probe
ttcaggatgattcatctagcagaca

SEQ ID NO: 299007 - DNA, 25 bp, probe
ttcactgcagtcccactaagcatca

SEQ ID NO: 299008 - DNA, 25 bp, probe
ttcattcattcatccatacatccac

SEQ ID NO: 299009 - DNA, 25 bp, probe
ttcattcatcattatcgttgtcctg

SEQ ID NO: 299010 - DNA, 25 bp, probe
ttcactcatattaatggaggattgt

SEQ ID NO: 299011 - DNA, 25 bp, probe
ttcagtcgatatatgggctattggt

SEQ ID NO: 299012 - DNA, 25 bp, probe
ttcagtcagatgtgtatgcgtttgg

SEQ ID NO: 299013 - DNA, 25 bp, probe
ttcactcacagtctgagttcttgtc

SEQ ID NO: 299014 - DNA, 25 bp, probe
ttcatctaagtttgggtttgtattt

SEQ ID NO: 299015 - DNA, 25 bp, probe
ttcctaatgacgtggactttagcat

SEQ ID NO: 299016 - DNA, 25 bp, probe
ttctataatcacttggggtttgtac

SEQ ID NO: 299017 - DNA, 25 bp, probe
ttcctgcaacaggtgtgacagtttg

SEQ ID NO: 299018 - DNA, 25 bp, probe
ttcctgcaacaggtgtgacagtttg

SEQ ID NO: 299019 - DNA, 25 bp, probe
ttcctgcaacaggtgtgacagtttg

SEQ ID NO: 299020 - DNA, 25 bp, probe
ttcactgctacagagccacagtacc

SEQ ID NO: 299021 - DNA, 25 bp, probe
ttcactgctacagagccacagtacc

SEQ ID NO: 299022 - DNA, 25 bp, probe
ttcattgcataccggatacagatac

SEQ ID NO: 299023 - DNA, 25 bp, probe
ttcatattgacctgcatctcatcat

SEQ ID NO: 299024 - DNA, 25 bp, probe
ttcatattgacctgcatctcatcat

SEQ ID NO: 299025 - DNA, 25 bp, probe
ttcatgtttaatggcacctcatttg

SEQ ID NO: 299026 - DNA, 25 bp, probe
ttcatgtttaatggcacctcatttg

SEQ ID NO: 299027 - DNA, 25 bp, probe
ttcagtattaaactctcctttgata

SEQ ID NO: 299028 - DNA, 25 bp, probe
ttcagtattaaactctcctttgata

SEQ ID NO: 299029 - DNA, 25 bp, probe
ttcagtatggatggactccccttat

SEQ ID NO: 299030 - DNA, 25 bp, probe
ttcagtatggatggactccccttat

SEQ ID NO: 299031 - DNA, 25 bp, probe
ttcagtatggaccccttccaataag

SEQ ID NO: 299032 - DNA, 25 bp, probe
ttcagtagcagatgccgttcaaaag

SEQ ID NO: 299033 - DNA, 25 bp, probe
ttgcattcaaacctccttcaaaact

SEQ ID NO: 299034 - DNA, 25 bp, probe
ttcattcaaaatctgcccaaccaat

SEQ ID NO: 299035 - DNA, 25 bp, probe
ttcattcacaaacttccgctgtacc

SEQ ID NO: 299036 - DNA, 25 bp, probe
ttctaccagagtttcccattaggcc

SEQ ID NO: 299037 - DNA, 25 bp, probe
ttctacccaggtacgctgcaaagcc

SEQ ID NO: 299038 - DNA, 25 bp, probe
ttctacatcctgtttctccagaatg

SEQ ID NO: 299039 - DNA, 25 bp, probe
ttcatcaacagccttcgcaacaaag

SEQ ID NO: 299040 - DNA, 25 bp, probe
ttcatcacacgctacaccaagaaga

SEQ ID NO: 299041 - DNA, 25 bp, probe
ttcatcaccagctatctcgaagaag

SEQ ID NO: 299042 - DNA, 25 bp, probe
ttcagcatccacaactacaaatcac

SEQ ID NO: 299043 - DNA, 25 bp, probe
ttcatgctccaaagaacatttcata

SEQ ID NO: 299044 - DNA, 25 bp, probe
ttcatcaccacagaaagttctatct

SEQ ID NO: 299045 - DNA, 25 bp, probe
ttgcaatggccaaaagagttgttgc

SEQ ID NO: 299046 - DNA, 25 bp, probe
ttcatttgccaatcagaggatgttt

SEQ ID NO: 299047 - DNA, 25 bp, probe
ttcattggccaagtgcataagacta

SEQ ID NO: 299048 - DNA, 25 bp, probe
ttcattttgcaaggaagggcagacc

SEQ ID NO: 299049 - DNA, 25 bp, probe
ttctctttgaacctttggaggccgt

SEQ ID NO: 299050 - DNA, 25 bp, probe
ttgcttttaaggatcggctccctgt

SEQ ID NO: 299051 - DNA, 25 bp, probe
ttctactgtacaggacactggcccc

SEQ ID NO: 299052 - DNA, 25 bp, probe
ttctactgtacaggacactggcccc

SEQ ID NO: 299053 - DNA, 25 bp, probe
ttctaagtgcaatacttggcccgcc

SEQ ID NO: 299054 - DNA, 25 bp, probe
ttctacatgtgagatagttttcatt

SEQ ID NO: 299055 - DNA, 25 bp, probe
ttcatactggctgttggcatttctg

SEQ ID NO: 299056 - DNA, 25 bp, probe
ttcatactggctgttggcatttctg

SEQ ID NO: 299057 - DNA, 25 bp, probe
ttctatctggcaactggtactttga

SEQ ID NO: 299058 - DNA, 25 bp, probe
ttcttggtgacagtggaatctttgt

SEQ ID NO: 299059 - DNA, 25 bp, probe
ttcatgtgagctattggagttttcc

SEQ ID NO: 299060 - DNA, 25 bp, probe
ttcttaggaatctggtgtctgtccg

SEQ ID NO: 299061 - DNA, 25 bp, probe
ttgcattagagcacggagtccgtcc

SEQ ID NO: 299062 - DNA, 25 bp, probe
ttgctgtagatgtgcgtgcagtctg

SEQ ID NO: 299063 - DNA, 25 bp, probe
ttctttgatgaactgcgatgtctgg

SEQ ID NO: 299064 - DNA, 25 bp, probe
ttcatgttgtgtgctgggctctgga

SEQ ID NO: 299065 - DNA, 25 bp, probe
ttctgagaggcagtcttccttggca

SEQ ID NO: 299066 - DNA, 25 bp, probe
ttctgaggtatggcccatccaagac

SEQ ID NO: 299067 - DNA, 25 bp, probe
ttctgggtacccatgctaaccatgc

SEQ ID NO: 299068 - DNA, 25 bp, probe
ttcagggtatgaaacgcaaagccag

SEQ ID NO: 299069 - DNA, 25 bp, probe
ttcagggtatgaaacgcaaagccag

SEQ ID NO: 299070 - DNA, 25 bp, probe
ttcagttgtagcaatccccatacca

SEQ ID NO: 299071 - DNA, 25 bp, probe
ttcatgacgaagaatccccacaagc

SEQ ID NO: 299072 - DNA, 25 bp, probe
ttctgactgggaatgcccgcagctt

SEQ ID NO: 299073 - DNA, 25 bp, probe
ttcgaagtggaggtctgccagctgc

SEQ ID NO: 299074 - DNA, 25 bp, probe
ttcgaagtggaggtctgccagctgc

SEQ ID NO: 299075 - DNA, 25 bp, probe
ttcgaagtggaggtctgccagctgc

SEQ ID NO: 299076 - DNA, 25 bp, probe
ttcgaagtggaggtctgccagctgc

SEQ ID NO: 299077 - DNA, 25 bp, probe
ttcgacgaggagttcaccggggagg

SEQ ID NO: 299078 - DNA, 25 bp, probe
ttctgacagaggtgacccggcggat

SEQ ID NO: 299079 - DNA, 25 bp, probe
ttcttactagtttcccttgcatggt

SEQ ID NO: 299080 - DNA, 25 bp, probe
ttctttgtagtgtcccagctaaggc

SEQ ID NO: 299081 - DNA, 25 bp, probe
ttctcattgccaatggcctcctaat

SEQ ID NO: 299082 - DNA, 25 bp, probe
ttctcatatggacgggctccgtacc

SEQ ID NO: 299083 - DNA, 25 bp, probe
ttctcatatggacgggctccgtacc

SEQ ID NO: 299084 - DNA, 25 bp, probe
ttctttgtgtgttggatgccctacc

SEQ ID NO: 299085 - DNA, 25 bp, probe
ttctttgtgtgttggatgccctacc

SEQ ID NO: 299086 - DNA, 25 bp, probe
ttcgcttgtgtttctgtacttacca

SEQ ID NO: 299087 - DNA, 25 bp, probe
ttcctgtgtggggttcagcgtagaa

SEQ ID NO: 299088 - DNA, 25 bp, probe
ttcttgtgggagatactcagtatgg

SEQ ID NO: 299089 - DNA, 25 bp, probe
ttcttttgcgacatgacggtgatgc

SEQ ID NO: 299090 - DNA, 25 bp, probe
ttcttggtgcggcagagggtgaagg

SEQ ID NO: 299091 - DNA, 25 bp, probe
ttcattgggttgtcagatagtctat

SEQ ID NO: 299092 - DNA, 25 bp, probe
ttcattgggttgtcagatagtctat

SEQ ID NO: 299093 - DNA, 25 bp, probe
ttctctgcgtgttgcactgcatagt

SEQ ID NO: 299094 - DNA, 25 bp, probe
ttcttcaggtagcctcatggcagcg

SEQ ID NO: 299095 - DNA, 25 bp, probe
ttcattctggtaccacaggcagttt

SEQ ID NO: 299096 - DNA, 25 bp, probe
ttcacctcagctttctcaggacatt

SEQ ID NO: 299097 - DNA, 25 bp, probe
ttcacctccatttcttggttttgta

SEQ ID NO: 299098 - DNA, 25 bp, probe
ttcacctccatttcttggttttgta

SEQ ID NO: 299099 - DNA, 25 bp, probe
ttcagcatcctttatctgtgacttc

SEQ ID NO: 299100 - DNA, 25 bp, probe
ttcatgcccatgtctactattttgc

SEQ ID NO: 299101 - DNA, 25 bp, probe
ttcagcccatcacgctgtggtttga

SEQ ID NO: 299102 - DNA, 25 bp, probe
ttcatgcagaaccagttgatgtttg

SEQ ID NO: 299103 - DNA, 25 bp, probe
ttcatgaccacccattgattgtatt

SEQ ID NO: 299104 - DNA, 25 bp, probe
ttcatcaccactgtagattttgctg

SEQ ID NO: 299105 - DNA, 25 bp, probe
ttcatcgtggatttaatttatgctt

SEQ ID NO: 299106 - DNA, 25 bp, probe
ttcatcgtggatttaatttatgctt

SEQ ID NO: 299107 - DNA, 25 bp, probe
ttcagcctggatttgaagttcctga

SEQ ID NO: 299108 - DNA, 25 bp, probe
ttcatcctggtctgagacctcagag

SEQ ID NO: 299109 - DNA, 25 bp, probe
ttctactacatctaatgaccacatt

SEQ ID NO: 299110 - DNA, 25 bp, probe
ttcttcctcaccaatgacattcttt

SEQ ID NO: 299111 - DNA, 25 bp, probe
ttcttcctcaccaatgacattcttt

SEQ ID NO: 299112 - DNA, 25 bp, probe
ttgcttctgctaggttaaactttta

SEQ ID NO: 299113 - DNA, 25 bp, probe
ttcagatccatcggtttatactatt

SEQ ID NO: 299114 - DNA, 25 bp, probe
ttcagttctgctctatcttactgct

SEQ ID NO: 299115 - DNA, 25 bp, probe
ttcagtcatcctgaacctgagttca

SEQ ID NO: 299116 - DNA, 25 bp, probe
ttcttcaccttgaacctgtttattg

SEQ ID NO: 299117 - DNA, 25 bp, probe
ttcttggacttcaaccacttttatg

SEQ ID NO: 299118 - DNA, 25 bp, probe
ttcttggacttcaaccacttttatg

SEQ ID NO: 299119 - DNA, 25 bp, probe
ttcttggttccatcaatctgtttat

SEQ ID NO: 299120 - DNA, 25 bp, probe
ttctatggtccccgtagctatttta

SEQ ID NO: 299121 - DNA, 25 bp, probe
ttctatggtccccgtagctatttta

SEQ ID NO: 299122 - DNA, 25 bp, probe
ttgcttccttccttatagtattttt

SEQ ID NO: 299123 - DNA, 25 bp, probe
ttgcttccttccttatagtattttt

SEQ ID NO: 299124 - DNA, 25 bp, probe
ttcttcccttcatgatagtattctt

SEQ ID NO: 299125 - DNA, 25 bp, probe
ttctattccttccaatgagagatta

SEQ ID NO: 299126 - DNA, 25 bp, probe
ttctacctcttcccaggacattaaa

SEQ ID NO: 299127 - DNA, 25 bp, probe
ttctacctcttcccaggacattaaa

SEQ ID NO: 299128 - DNA, 25 bp, probe
ttctatctctttcaagggcagaaga

SEQ ID NO: 299129 - DNA, 25 bp, probe
ttcagtgccttccagaagggagaaa

SEQ ID NO: 299130 - DNA, 25 bp, probe
ttcagaaccctatctgggagagaag

SEQ ID NO: 299131 - DNA, 25 bp, probe
ttcgagtccgtcacgtgggagaacc

SEQ ID NO: 299132 - DNA, 25 bp, probe
ttcggcctaatcatttgggagatgg

SEQ ID NO: 299133 - DNA, 25 bp, probe
ttcagtgacatttggttctgggaat

SEQ ID NO: 299134 - DNA, 25 bp, probe
ttcgtggcattgggtctgggatgaa

SEQ ID NO: 299135 - DNA, 25 bp, probe
ttcattgggtgatgtcagggtgata

SEQ ID NO: 299136 - DNA, 25 bp, probe
ttcattcgtggtctcagcggatgga

SEQ ID NO: 299137 - DNA, 25 bp, probe
ttcttgtgtggtgtcatcgccatcg

SEQ ID NO: 299138 - DNA, 25 bp, probe
ttcatgtgggggctcatcgcccaag

SEQ ID NO: 299139 - DNA, 25 bp, probe
ttcaggagggaggcttcgggcacag

SEQ ID NO: 299140 - DNA, 25 bp, probe
ttcagcacagggctctttctgactc

SEQ ID NO: 299141 - DNA, 25 bp, probe
ttcagccaggagtatttcctgtgcc

SEQ ID NO: 299142 - DNA, 25 bp, probe
ttcagcgagggcttctactttgctt

SEQ ID NO: 299143 - DNA, 25 bp, probe
ttccgggacttcgactttgtgtcag

SEQ ID NO: 299144 - DNA, 25 bp, probe
ttccgggacttcgactttgtgtcag

SEQ ID NO: 299145 - DNA, 25 bp, probe
ttccgggacttcgactttgtgtcag

SEQ ID NO: 299146 - DNA, 25 bp, probe
ttctctggtggcattcctttaggaa

SEQ ID NO: 299147 - DNA, 25 bp, probe
ttctctggtggcattcctttaggaa

SEQ ID NO: 299148 - DNA, 25 bp, probe
ttcagtagttactgctgtttaggaa

SEQ ID NO: 299149 - DNA, 25 bp, probe
ttcagttgttagtgtgtcttagtgt

SEQ ID NO: 299150 - DNA, 25 bp, probe
ttcagccttctagagagttacagtt

SEQ ID NO: 299151 - DNA, 25 bp, probe
ttcagccttctagagagttacagtt

SEQ ID NO: 299152 - DNA, 25 bp, probe
ttcagtcttgacggtgaatggaaga

SEQ ID NO: 299153 - DNA, 25 bp, probe
ttgagtcttaccgtaattgataaca

SEQ ID NO: 299154 - DNA, 25 bp, probe
ttcagtgcatgaaccgttattgatc

SEQ ID NO: 299155 - DNA, 25 bp, probe
ttcatggatgcaactcaaattcaga

SEQ ID NO: 299156 - DNA, 25 bp, probe
ttcatgcgatgtgtccaatcggaga

SEQ ID NO: 299157 - DNA, 25 bp, probe
ttcatgctgtgtgctggacgctgga

SEQ ID NO: 299158 - DNA, 25 bp, probe
ttcatgatggtggtgatcagcctgg

SEQ ID NO: 299159 - DNA, 25 bp, probe
ttcatatcctgagatagctctgcag

SEQ ID NO: 299160 - DNA, 25 bp, probe
ttcttctgctatgtgacttgcatcg

SEQ ID NO: 299161 - DNA, 25 bp, probe
ttcttcgccatgatgctcctcatgg

SEQ ID NO: 299162 - DNA, 25 bp, probe
ttcttcgccatgatgctcctcatgg

SEQ ID NO: 299163 - DNA, 25 bp, probe
ttcttcctcagcatcaactggcagg

SEQ ID NO: 299164 - DNA, 25 bp, probe
ttcttcctcagcatcaactggcagg

SEQ ID NO: 299165 - DNA, 25 bp, probe
ttcttcctcagcatcaactggcagg

SEQ ID NO: 299166 - DNA, 25 bp, probe
ttcatctggctagttcaccatcaca

SEQ ID NO: 299167 - DNA, 25 bp, probe
ttcatgagtgcaactctccgtacat

SEQ ID NO: 299168 - DNA, 25 bp, probe
ttcaggctcgagtcattagtgtcat

SEQ ID NO: 299169 - DNA, 25 bp, probe
ttcaggcatcctcatataattaaac

SEQ ID NO: 299170 - DNA, 25 bp, probe
ttcaggaacttttccttcatgaacc

SEQ ID NO: 299171 - DNA, 25 bp, probe
ttcatggaactacactcttgagcaa

SEQ ID NO: 299172 - DNA, 25 bp, probe
ttctgacactttcacttttgcagat

SEQ ID NO: 299173 - DNA, 25 bp, probe
ttcgaaattcttcttatccagagac

SEQ ID NO: 299174 - DNA, 25 bp, probe
ttcgaaattcttcttatccagagac

SEQ ID NO: 299175 - DNA, 25 bp, probe
ttctagaatatttgcctaattggga

SEQ ID NO: 299176 - DNA, 25 bp, probe
ttctcagaatacagcccagttggat

SEQ ID NO: 299177 - DNA, 25 bp, probe
ttcatcacttccagctcaggttgga

SEQ ID NO: 299178 - DNA, 25 bp, probe
ttcatcacttccagctcaggttgga

SEQ ID NO: 299179 - DNA, 25 bp, probe
ttcttgcttcctatgctagtattgg

SEQ ID NO: 299180 - DNA, 25 bp, probe
ttgtttacacaccctggtactgggg

SEQ ID NO: 299181 - DNA, 25 bp, probe
ttctatgtactagtactgtgtactg

SEQ ID NO: 299182 - DNA, 25 bp, probe
ttcagagtagcaacttttcaacttt

SEQ ID NO: 299183 - DNA, 25 bp, probe
ttcagttaaatttttcacctgctgt

SEQ ID NO: 299184 - DNA, 25 bp, probe
ttctgttgtttttgtagcaccgctc

SEQ ID NO: 299185 - DNA, 25 bp, probe
ttctgttgtttttgtagcaccgctc

SEQ ID NO: 299186 - DNA, 25 bp, probe
ttctttgtcattcagttctaggcct

SEQ ID NO: 299187 - DNA, 25 bp, probe
ttctgttggatgaaagggataacct

SEQ ID NO: 299188 - DNA, 25 bp, probe
ttcttaagtgccaatgggcccacct

SEQ ID NO: 299189 - DNA, 25 bp, probe
ttcttcaagctcattggtgacaccc

SEQ ID NO: 299190 - DNA, 25 bp, probe
ttcttcagcatccgacgggaacatc

SEQ ID NO: 299191 - DNA, 25 bp, probe
ttcttcaggaaacaggaacattcaa

SEQ ID NO: 299192 - DNA, 25 bp, probe
ttctccgtgcaacctggaaagttca

SEQ ID NO: 299193 - DNA, 25 bp, probe
ttgtcctggaccctgtagggtgcca

SEQ ID NO: 299194 - DNA, 25 bp, probe
ttgctgccaggagacttggggagca

SEQ ID NO: 299195 - DNA, 25 bp, probe
ttctacagccactacttgggaacac

SEQ ID NO: 299196 - DNA, 25 bp, probe
ttctacagccactacttgggaacac

SEQ ID NO: 299197 - DNA, 25 bp, probe
ttctacattccgttcatggggcaca

SEQ ID NO: 299198 - DNA, 25 bp, probe
ttcataaaccctggcactggtcaca

SEQ ID NO: 299199 - DNA, 25 bp, probe
ttctcaaaggcaatccagctttcac

SEQ ID NO: 299200 - DNA, 25 bp, probe
ttctcactacgaaccagtcactact

SEQ ID NO: 299201 - DNA, 25 bp, probe
ttctcactacgaaccagtcactact

SEQ ID NO: 299202 - DNA, 25 bp, probe
ttctccaacgacatcatgctactgc

SEQ ID NO: 299203 - DNA, 25 bp, probe
ttcttaccatacacattatctccag

SEQ ID NO: 299204 - DNA, 25 bp, probe
ttcttacgccacatgtgtcacttca

SEQ ID NO: 299205 - DNA, 25 bp, probe
ttcttacgccacatgtgtcacttca

SEQ ID NO: 299206 - DNA, 25 bp, probe
ttcttacgccacatgtgtcacttca

SEQ ID NO: 299207 - DNA, 25 bp, probe
ttcttacgccacatgtgtcacttca

SEQ ID NO: 299208 - DNA, 25 bp, probe
ttcttacgccacatgtgtcacttca

SEQ ID NO: 299209 - DNA, 25 bp, probe
ttcagtatccactgggtgccttgga

SEQ ID NO: 299210 - DNA, 25 bp, probe
ttctcttacacttgggggtagcggg

SEQ ID NO: 299211 - DNA, 25 bp, probe
ttctctgtacgcccagggaaagcgg

SEQ ID NO: 299212 - DNA, 25 bp, probe
ttctttacctccagggatcagctgt

SEQ ID NO: 299213 - DNA, 25 bp, probe
ttctccggacccagaagatcatctg

SEQ ID NO: 299214 - DNA, 25 bp, probe
ttctccggacccagaagatcatctg

SEQ ID NO: 299215 - DNA, 25 bp, probe
ttctgccggaacccggacaacgaca

SEQ ID NO: 299216 - DNA, 25 bp, probe
ttgtccgtaccctggaatgacaaat

SEQ ID NO: 299217 - DNA, 25 bp, probe
ttgaccgtacaggtacagaagccga

SEQ ID NO: 299218 - DNA, 25 bp, probe
ttgcatctccgccaggctaaaagcc

SEQ ID NO: 299219 - DNA, 25 bp, probe
ttcttctcaggcaggaaaagccacc

SEQ ID NO: 299220 - DNA, 25 bp, probe
ttctgttcagcaaaggaaaaaggcc

SEQ ID NO: 299221 - DNA, 25 bp, probe
ttcatgctttgctccgaacaaatag

SEQ ID NO: 299222 - DNA, 25 bp, probe
ttctgttcagcattcactaaccctg

SEQ ID NO: 299223 - DNA, 25 bp, probe
ttctcatatagatcaaacagcccta

SEQ ID NO: 299224 - DNA, 25 bp, probe
ttcatataaactcaagtgcctgcta

SEQ ID NO: 299225 - DNA, 25 bp, probe
ttcttcacaaattgcaaatccgcta

SEQ ID NO: 299226 - DNA, 25 bp, probe
ttgcttgcccaattgccaaactaaa

SEQ ID NO: 299227 - DNA, 25 bp, probe
ttgcttgcccaattgccaaactaaa

SEQ ID NO: 299228 - DNA, 25 bp, probe
ttcatcggccaagtccataaaacaa

SEQ ID NO: 299229 - DNA, 25 bp, probe
ttcattaccagaatatatcccaaag

SEQ ID NO: 299230 - DNA, 25 bp, probe
ttcatttcccataacatcccagata

SEQ ID NO: 299231 - DNA, 25 bp, probe
ttctttgcccaaaatgcagtgccaa

SEQ ID NO: 299232 - DNA, 25 bp, probe
ttctttggccaagtagtggcagcca

SEQ ID NO: 299233 - DNA, 25 bp, probe
ttcttgtgcgcacacttgatgaagg

SEQ ID NO: 299234 - DNA, 25 bp, probe
ttctttgccgatttttgaatgtgat

SEQ ID NO: 299235 - DNA, 25 bp, probe
ttctttgccgatttttgaatgtgat

SEQ ID NO: 299236 - DNA, 25 bp, probe
ttcatttctcaatttcttgtttaaa

SEQ ID NO: 299237 - DNA, 25 bp, probe
ttcatttctcaggatgcttcttacc

SEQ ID NO: 299238 - DNA, 25 bp, probe
ttcatttctcaggatgcttcttacc

SEQ ID NO: 299239 - DNA, 25 bp, probe
ttcatttcaagcctgcttccagcaa

SEQ ID NO: 299240 - DNA, 25 bp, probe
ttcagtgtgaagctcttgtcagaag

SEQ ID NO: 299241 - DNA, 25 bp, probe
ttcattgtaaactttctcagggtca

SEQ ID NO: 299242 - DNA, 25 bp, probe
ttcttttatagctgcttcagtgaga

SEQ ID NO: 299243 - DNA, 25 bp, probe
ttctttttagtgtcttatcagtggg

SEQ ID NO: 299244 - DNA, 25 bp, probe
ttcatgttcattgggtttatcctga

SEQ ID NO: 299245 - DNA, 25 bp, probe
ttcttccagtcagtttttctcttaa

SEQ ID NO: 299246 - DNA, 25 bp, probe
ttctgaaattcagaaatcttcttcc

SEQ ID NO: 299247 - DNA, 25 bp, probe
ttcatgaagattaccaactgcctta

SEQ ID NO: 299248 - DNA, 25 bp, probe
ttcatgaagattaccaactgcctta

SEQ ID NO: 299249 - DNA, 25 bp, probe
ttcatgtagtggtctaagctcctcc

SEQ ID NO: 299250 - DNA, 25 bp, probe
ttcatggcagattgtttgtgctttc

SEQ ID NO: 299251 - DNA, 25 bp, probe
ttcatcccattgtgcgtgttgtcat

SEQ ID NO: 299252 - DNA, 25 bp, probe
ttcattcctgaagtggctgtagctt

SEQ ID NO: 299253 - DNA, 25 bp, probe
ttcattcctgaagtggctgtagctt

SEQ ID NO: 299254 - DNA, 25 bp, probe
ttcattctgctgagcaagtgtggct

SEQ ID NO: 299255 - DNA, 25 bp, probe
ttcatttctcattcaattgtgacat

SEQ ID NO: 299256 - DNA, 25 bp, probe
ttctatttcatattaattccaggtg

SEQ ID NO: 299257 - DNA, 25 bp, probe
ttcgcaagcctgatactctccaggc

SEQ ID NO: 299258 - DNA, 25 bp, probe
ttcctaccgaaaccctgcagaggga

SEQ ID NO: 299259 - DNA, 25 bp, probe
ttctctaacaaaacccattgaaagt

SEQ ID NO: 299260 - DNA, 25 bp, probe
ttcttaatcaccaaggtcatatgaa

SEQ ID NO: 299261 - DNA, 25 bp, probe
ttcattcaatcaaaggattcagcat

SEQ ID NO: 299262 - DNA, 25 bp, probe
ttcattcaatcaaagatcagccagc

SEQ ID NO: 299263 - DNA, 25 bp, probe
ttcatttagccattgcacagtcagc

SEQ ID NO: 299264 - DNA, 25 bp, probe
ttctgcttacagctacagtcacatc

SEQ ID NO: 299265 - DNA, 25 bp, probe
ttcatggaagccatagagtacatcg

SEQ ID NO: 299266 - DNA, 25 bp, probe
ttctgggaaggtaagcggcatcgga

SEQ ID NO: 299267 - DNA, 25 bp, probe
ttcgggagtggtcagactgtcgtct

SEQ ID NO: 299268 - DNA, 25 bp, probe
ttcagaggagggtcaaacacatcac

SEQ ID NO: 299269 - DNA, 25 bp, probe
ttcagaggagggtcaaacacatcac

SEQ ID NO: 299270 - DNA, 25 bp, probe
ttgcagggactccagaaaccattct

SEQ ID NO: 299271 - DNA, 25 bp, probe
ttcgtgcttttgtacagacctttgt

SEQ ID NO: 299272 - DNA, 25 bp, probe
ttcatccttcttgtaaccatattgt

SEQ ID NO: 299273 - DNA, 25 bp, probe
ttgcccttcgggaaatccgaatgct

SEQ ID NO: 299274 - DNA, 25 bp, probe
ccaattatagttcggctcttgactg

SEQ ID NO: 299275 - DNA, 25 bp, probe
ttccctgttaggctgatttcagatt

SEQ ID NO: 299276 - DNA, 25 bp, probe
ttctccttgtaggggtctctcagag

SEQ ID NO: 299277 - DNA, 25 bp, probe
ttctctctaggagggagccttgtga

SEQ ID NO: 299278 - DNA, 25 bp, probe
ttctatggagtgtgcggcgatgggg

SEQ ID NO: 299279 - DNA, 25 bp, probe
ttcattgtggctgagaccgtgggcg

SEQ ID NO: 299280 - DNA, 25 bp, probe
ttcgtggcgttgaagcgcgtgcggg

SEQ ID NO: 299281 - DNA, 25 bp, probe
ttcggacgggattcgaggcgtgcga

SEQ ID NO: 299282 - DNA, 25 bp, probe
ttcggcacgagcggcacgagggaaa

SEQ ID NO: 299283 - DNA, 25 bp, probe
ttcggaagcatgttgtgtgagggat

SEQ ID NO: 299284 - DNA, 25 bp, probe
ttcaggtgagcagttagagtaggtg

SEQ ID NO: 299285 - DNA, 25 bp, probe
ttcagggaggctcacagtcagggac

SEQ ID NO: 299286 - DNA, 25 bp, probe
ttcagggagtgtcacctcaaatgca

SEQ ID NO: 299287 - DNA, 25 bp, probe
ttcagggatttgccaattccactca

SEQ ID NO: 299288 - DNA, 25 bp, probe
ttcaggagatgtgaccattctccaa

SEQ ID NO: 299289 - DNA, 25 bp, probe
ttgcagaggactgaccctgctacac

SEQ ID NO: 299290 - DNA, 25 bp, probe
ttgcagaggactgaccctgctacac

SEQ ID NO: 299291 - DNA, 25 bp, probe
ttcatggcgtgtgaggagctgcccc

SEQ ID NO: 299292 - DNA, 25 bp, probe
ttcattgaggctgcaagagcacagg

SEQ ID NO: 299293 - DNA, 25 bp, probe
ttcatcaagcgctacgagacgctgg

SEQ ID NO: 299294 - DNA, 25 bp, probe
ttctcagagccattaaacactagtt

SEQ ID NO: 299295 - DNA, 25 bp, probe
ttctatcccaaactaagctatgtga

SEQ ID NO: 299296 - DNA, 25 bp, probe
ttcttgcctcagtgttgtgcttgta

SEQ ID NO: 299297 - DNA, 25 bp, probe
ttctctcctggtctggtgtatgcaa

SEQ ID NO: 299298 - DNA, 25 bp, probe
ttctctccattggttatggtgacat

SEQ ID NO: 299299 - DNA, 25 bp, probe
ttctcctatagcagtaagtacagca

SEQ ID NO: 299300 - DNA, 25 bp, probe
ttctctctaaggagaatggcccagt

SEQ ID NO: 299301 - DNA, 25 bp, probe
ttctgattaagagccagggccagag

SEQ ID NO: 299302 - DNA, 25 bp, probe
ttcagtggagactccctggccaaca

SEQ ID NO: 299303 - DNA, 25 bp, probe
ttcaggttacccttctgtgctagaa

SEQ ID NO: 299304 - DNA, 25 bp, probe
ttctggagaaccttcgtggtggaac

SEQ ID NO: 299305 - DNA, 25 bp, probe
ttctagatgacaacttccggaagaa

SEQ ID NO: 299306 - DNA, 25 bp, probe
ttcttcatgaagacctcacagtaaa

SEQ ID NO: 299307 - DNA, 25 bp, probe
ttcttcatgaagacctcacagtaaa

SEQ ID NO: 299308 - DNA, 25 bp, probe
ttcttatagcaatacactgtaatat

SEQ ID NO: 299309 - DNA, 25 bp, probe
ttcttataaaatgcatctcaaatct

SEQ ID NO: 299310 - DNA, 25 bp, probe
ttctttatactgttgtggacaatct

SEQ ID NO: 299311 - DNA, 25 bp, probe
ttcttgtatcctttgaggagacgtt

SEQ ID NO: 299312 - DNA, 25 bp, probe
ttgttgcttcgcagggggatttgtt

SEQ ID NO: 299313 - DNA, 25 bp, probe
ttgtccttgcactcttgggtatttt

SEQ ID NO: 299314 - DNA, 25 bp, probe
ttctcttgtgactctcagcgtatgt

SEQ ID NO: 299315 - DNA, 25 bp, probe
ttcttgctgaacttcttcatgtatg

SEQ ID NO: 299316 - DNA, 25 bp, probe
ttcttgcgaaaggttctctctgtac

SEQ ID NO: 299317 - DNA, 25 bp, probe
ttcttggaagactacttcactgcta

SEQ ID NO: 299318 - DNA, 25 bp, probe
ttcttggaagactacttcactgcta

SEQ ID NO: 299319 - DNA, 25 bp, probe
ttctgggaaacaagcttacatagtc

SEQ ID NO: 299320 - DNA, 25 bp, probe
ttcttacttaacctgaagctagacg

SEQ ID NO: 299321 - DNA, 25 bp, probe
ttctcttcttaaccgaatgtcagat

SEQ ID NO: 299322 - DNA, 25 bp, probe
ttctatacttaatcccatgtcatgc

SEQ ID NO: 299323 - DNA, 25 bp, probe
ttcttgacatttatcacctctgatg

SEQ ID NO: 299324 - DNA, 25 bp, probe
ttctcccatattattcagctcgagt

SEQ ID NO: 299325 - DNA, 25 bp, probe
ttctcccatattattcagctcgagt

SEQ ID NO: 299326 - DNA, 25 bp, probe
ttctaccatagtccagtggctctgg

SEQ ID NO: 299327 - DNA, 25 bp, probe
ttctaccatagtccagtggctctgg

SEQ ID NO: 299328 - DNA, 25 bp, probe
ttctatgcaaggtctctgtggccgc

SEQ ID NO: 299329 - DNA, 25 bp, probe
ttcttgcaattgtccatgtgtttct

SEQ ID NO: 299330 - DNA, 25 bp, probe
ttcttgcagttaatctcgttattta

SEQ ID NO: 299331 - DNA, 25 bp, probe
ttcatctctgaaatatctcgttatt

SEQ ID NO: 299332 - DNA, 25 bp, probe
ttcatgctccactattttattaaaa

SEQ ID NO: 299333 - DNA, 25 bp, probe
ttccctcccattgtcattgaaaaag

SEQ ID NO: 299334 - DNA, 25 bp, probe
ttcccataccctgtggcaaaaccag

SEQ ID NO: 299335 - DNA, 25 bp, probe
ttcccatccctcattggaatcacca

SEQ ID NO: 299336 - DNA, 25 bp, probe
ttcgccagcccaactttgctagaaa

SEQ ID NO: 299337 - DNA, 25 bp, probe
ttcgccagcccaactttgctagaaa

SEQ ID NO: 299338 - DNA, 25 bp, probe
ttcccacctaaaaatgtctgaatgc

SEQ ID NO: 299339 - DNA, 25 bp, probe
ttgcctcagccacagaatttgtaat

SEQ ID NO: 299340 - DNA, 25 bp, probe
ttcatactgccaataaactcttaat

SEQ ID NO: 299341 - DNA, 25 bp, probe
ttcgagatgctctctcaaccttaac

SEQ ID NO: 299342 - DNA, 25 bp, probe
ttcgagatgctctctcaaccttaac

SEQ ID NO: 299343 - DNA, 25 bp, probe
ttcagtgtactcatcaattttaagc

SEQ ID NO: 299344 - DNA, 25 bp, probe
ttcattccacttacaattcctaatc

SEQ ID NO: 299345 - DNA, 25 bp, probe
ttcattggcccgccaatacctcaga

SEQ ID NO: 299346 - DNA, 25 bp, probe
ttcttgggcctccagttttcaaagg

SEQ ID NO: 299347 - DNA, 25 bp, probe
ttctcagggtcatcagtgacttcaa

SEQ ID NO: 299348 - DNA, 25 bp, probe
ttctcagtgggcacagtctcttact

SEQ ID NO: 299349 - DNA, 25 bp, probe
ttctctgggagatcttctctctggc

SEQ ID NO: 299350 - DNA, 25 bp, probe
ttctccgaggacggttaccgcacgg

SEQ ID NO: 299351 - DNA, 25 bp, probe
ttctccgaggacggttaccgcacgg

SEQ ID NO: 299352 - DNA, 25 bp, probe
ttctgggaggcttcagttaccgctg

SEQ ID NO: 299353 - DNA, 25 bp, probe
ttctgtgagggatcgctttaatgca

SEQ ID NO: 299354 - DNA, 25 bp, probe
ttcttctgggctacactatctaaca

SEQ ID NO: 299355 - DNA, 25 bp, probe
ttctacaagttcaactgataagtca

SEQ ID NO: 299356 - DNA, 25 bp, probe
ttctatacaactcaatctaagtcag

SEQ ID NO: 299357 - DNA, 25 bp, probe
ttctaactccttgatctgtaataac

SEQ ID NO: 299358 - DNA, 25 bp, probe
ttctaccttagttatcattaatgta

SEQ ID NO: 299359 - DNA, 25 bp, probe
ttctaccctaatttcactggagtga

SEQ ID NO: 299360 - DNA, 25 bp, probe
ttctgaccaagaatattgcttggat

SEQ ID NO: 299361 - DNA, 25 bp, probe
ttcatgtcccagaattggcattgat

SEQ ID NO: 299362 - DNA, 25 bp, probe
ttcattccactgaggggcaatccaa

SEQ ID NO: 299363 - DNA, 25 bp, probe
ttcttccacatggcagcggagaccc

SEQ ID NO: 299364 - DNA, 25 bp, probe
ttcagtccctgtatggagacccaaa

SEQ ID NO: 299365 - DNA, 25 bp, probe
ttctaccactgtattaacaccacaa

SEQ ID NO: 299366 - DNA, 25 bp, probe
ttccagcaacatgagggaaataagc

SEQ ID NO: 299367 - DNA, 25 bp, probe
ttctcagaagctgatttaaaagagc

SEQ ID NO: 299368 - DNA, 25 bp, probe
ttcttgccgatccttgtcagaaaga

SEQ ID NO: 299369 - DNA, 25 bp, probe
ttctttcaatcttaggagacagtga

SEQ ID NO: 299370 - DNA, 25 bp, probe
ttcttctgattctaggaaacgctaa

SEQ ID NO: 299371 - DNA, 25 bp, probe
ttcttctgattctaggaaacgctaa

SEQ ID NO: 299372 - DNA, 25 bp, probe
ttcttctcttgctgtaacacttgac

SEQ ID NO: 299373 - DNA, 25 bp, probe
ttctcgacattcttgggatagttca

SEQ ID NO: 299374 - DNA, 25 bp, probe
ttcagtgtcttaatgtggaagttaa

SEQ ID NO: 299375 - DNA, 25 bp, probe
ttcgtggcggtcatggaattcatat

SEQ ID NO: 299376 - DNA, 25 bp, probe
ttctgtggctgggctatgccaactc

SEQ ID NO: 299377 - DNA, 25 bp, probe
ttctctcagttgggatgcttcactc

SEQ ID NO: 299378 - DNA, 25 bp, probe
ttctctcagttgggatgcttcactc

SEQ ID NO: 299379 - DNA, 25 bp, probe
ttcattcagttgacactgagctcct

SEQ ID NO: 299380 - DNA, 25 bp, probe
ttcattcacgtggcacaggctccac

SEQ ID NO: 299381 - DNA, 25 bp, probe
ttcatctcctgtcccaggattagca

SEQ ID NO: 299382 - DNA, 25 bp, probe
ttcttgctctgggcatctaattcca

SEQ ID NO: 299383 - DNA, 25 bp, probe
ttcttgtctggagtctgcacataga

SEQ ID NO: 299384 - DNA, 25 bp, probe
ttcttgctgctgccacctaatggaa

SEQ ID NO: 299385 - DNA, 25 bp, probe
ttcttctggctgaagctaaagatca

SEQ ID NO: 299386 - DNA, 25 bp, probe
ttcttctggatcggctactgcaaca

SEQ ID NO: 299387 - DNA, 25 bp, probe
ttcatgtcagtgagagcttcccaca

SEQ ID NO: 299388 - DNA, 25 bp, probe
ttcatgaggcgacaggtcttcaaat

SEQ ID NO: 299389 - DNA, 25 bp, probe
ttcatgaggcgacaggtcttcaaat

SEQ ID NO: 299390 - DNA, 25 bp, probe
ttcatgatggaacacccccatttac

SEQ ID NO: 299391 - DNA, 25 bp, probe
ttctatgtgaagcaaaccaattata

SEQ ID NO: 299392 - DNA, 25 bp, probe
ttctcagatgaacagtaggactttg

SEQ ID NO: 299393 - DNA, 25 bp, probe
ttctcagatgaacagtaggactttg

SEQ ID NO: 299394 - DNA, 25 bp, probe
ttctaagccctgttcagagacttcg

SEQ ID NO: 299395 - DNA, 25 bp, probe
ttctaagccctgttcagagacttcg

SEQ ID NO: 299396 - DNA, 25 bp, probe
ttgctgaggccccagtaggggtggg

SEQ ID NO: 299397 - DNA, 25 bp, probe
ttcgggcacccaggaatgcgggggt

SEQ ID NO: 299398 - DNA, 25 bp, probe
ttcggagcctcctcagtgaaggtgg

SEQ ID NO: 299399 - DNA, 25 bp, probe
ttcgagactcctcaagcatgaaagg

SEQ ID NO: 299400 - DNA, 25 bp, probe
ttcgtgagtcacctggaggccaagg

SEQ ID NO: 299401 - DNA, 25 bp, probe
ttctggagtcagactggctgtgtca

SEQ ID NO: 299402 - DNA, 25 bp, probe
ttctgcaaatcgaggctggaccacc

SEQ ID NO: 299403 - DNA, 25 bp, probe
ttctatgactggaggcattactgca

SEQ ID NO: 299404 - DNA, 25 bp, probe
ttctctgtccacagtcaatgctgcc

SEQ ID NO: 299405 - DNA, 25 bp, probe
ttctctgtccacagtcaatgctgcc

SEQ ID NO: 299406 - DNA, 25 bp, probe
ttcttattccaggtgcaagcagtcc

SEQ ID NO: 299407 - DNA, 25 bp, probe
ttctcatttctaagctcaaagctca

SEQ ID NO: 299408 - DNA, 25 bp, probe
ttcttttgctcatcttagaccacag

SEQ ID NO: 299409 - DNA, 25 bp, probe
ttctattcatttttttgcatccaat

SEQ ID NO: 299410 - DNA, 25 bp, probe
ttctttctcattttatgttgaacta

SEQ ID NO: 299411 - DNA, 25 bp, probe
ttctttgtatgtgtagcttgctagt

SEQ ID NO: 299412 - DNA, 25 bp, probe
ttgcgtttattacgactttcaaggt

SEQ ID NO: 299413 - DNA, 25 bp, probe
ttgcgtttattacgactttcaaggt

SEQ ID NO: 299414 - DNA, 25 bp, probe
ttcattttataacattgggcacggt

SEQ ID NO: 299415 - DNA, 25 bp, probe
ttcctttataggccaaggaccgcag

SEQ ID NO: 299416 - DNA, 25 bp, probe
ttccctccgaggccaaggacaagcc

SEQ ID NO: 299417 - DNA, 25 bp, probe
ttccctccgaggccaaggacaagcc

SEQ ID NO: 299418 - DNA, 25 bp, probe
ttccctccaaccgtgaggaaaatcg

SEQ ID NO: 299419 - DNA, 25 bp, probe
ttcatcgtctactcggagagcaaaa

SEQ ID NO: 299420 - DNA, 25 bp, probe
ttcatatgtccctcgtgaggctgga

SEQ ID NO: 299421 - DNA, 25 bp, probe
ttcatacatccctcagtttcttaaa

SEQ ID NO: 299422 - DNA, 25 bp, probe
ttcattcttctctcagtcttaaaga

SEQ ID NO: 299423 - DNA, 25 bp, probe
ttcatttttagcacttctcaccaga

SEQ ID NO: 299424 - DNA, 25 bp, probe
ttcatatgtgtttttcttacactca

SEQ ID NO: 299425 - DNA, 25 bp, probe
ttcttggatttcctctgtagcagcc

SEQ ID NO: 299426 - DNA, 25 bp, probe
ttctttctttgacttgtgactgccc

SEQ ID NO: 299427 - DNA, 25 bp, probe
ttcgttttgtgactcacattccccc

SEQ ID NO: 299428 - DNA, 25 bp, probe
ttcgtttcgatgactcattacccaa

SEQ ID NO: 299429 - DNA, 25 bp, probe
ttcgtcttcaaggtcccagaggaag

SEQ ID NO: 299430 - DNA, 25 bp, probe
ttctctcttaacgccactggtgata

SEQ ID NO: 299431 - DNA, 25 bp, probe
ttctctcttaacgccactggtgata

SEQ ID NO: 299432 - DNA, 25 bp, probe
ttcttgtggctagacgacaggcgaa

SEQ ID NO: 299433 - DNA, 25 bp, probe
ttcatttggaagtccaatagggcaa

SEQ ID NO: 299434 - DNA, 25 bp, probe
ttcatgtctggaaatcacagtaaac

SEQ ID NO: 299435 - DNA, 25 bp, probe
ttcattctcgtgacattaggaaatt

SEQ ID NO: 299436 - DNA, 25 bp, probe
ttcttctcagtgaatatatctgcta

SEQ ID NO: 299437 - DNA, 25 bp, probe
ttcttcatctgaaccaacatgctac

SEQ ID NO: 299438 - DNA, 25 bp, probe
ttcttcatctgaaccaacatgctac

SEQ ID NO: 299439 - DNA, 25 bp, probe
ttctcatctcattcgacacaagtcc

SEQ ID NO: 299440 - DNA, 25 bp, probe
ttctcatctcattcgacacaagtcc

SEQ ID NO: 299441 - DNA, 25 bp, probe
ttctgcatgttgtccatgccaacca

SEQ ID NO: 299442 - DNA, 25 bp, probe
ttctgcatgttgtccatgccaacca

SEQ ID NO: 299443 - DNA, 25 bp, probe
ttctcaggtggcaatgtaactcatt

SEQ ID NO: 299444 - DNA, 25 bp, probe
ttctgagagctcctgaggaatgtct

SEQ ID NO: 299445 - DNA, 25 bp, probe
ttctgagacttggattaattcatgg

SEQ ID NO: 299446 - DNA, 25 bp, probe
ttcataatcttttctccttcagtgg

SEQ ID NO: 299447 - DNA, 25 bp, probe
ttctgaagtctgagcccatttctgg

SEQ ID NO: 299448 - DNA, 25 bp, probe
ttctgtaacagcatggcgaactggg

SEQ ID NO: 299449 - DNA, 25 bp, probe
ttctttggagcaagggagacttgta

SEQ ID NO: 299450 - DNA, 25 bp, probe
ttccacggaaacagaactcgatgca

SEQ ID NO: 299451 - DNA, 25 bp, probe
ttcggcgccaaaggtgacccgcgcc

SEQ ID NO: 299452 - DNA, 25 bp, probe
ttctgtacgaactgatgaccggcca

SEQ ID NO: 299453 - DNA, 25 bp, probe
ttcttgaaagactgtgtaggcccag

SEQ ID NO: 299454 - DNA, 25 bp, probe
ttctagcaaaacaggtggcagcagc

SEQ ID NO: 299455 - DNA, 25 bp, probe
ttctagcaaaacaggtggcagcagc

SEQ ID NO: 299456 - DNA, 25 bp, probe
ttctcaaaaatcacctgccaaggaa

SEQ ID NO: 299457 - DNA, 25 bp, probe
ttctcaaaaatcacctgccaaggaa

SEQ ID NO: 299458 - DNA, 25 bp, probe
ttctttataatttcttgaacaggca

SEQ ID NO: 299459 - DNA, 25 bp, probe
ttctgtttaattcttgccaaccagg

SEQ ID NO: 299460 - DNA, 25 bp, probe
ttctcctgtttttattaaaccagtg

SEQ ID NO: 299461 - DNA, 25 bp, probe
ttcccgttttatttatctacaatag

SEQ ID NO: 299462 - DNA, 25 bp, probe
ttcgattttttatttatttaagctg

SEQ ID NO: 299463 - DNA, 25 bp, probe
ttcttttttaattatccaaacagtg

SEQ ID NO: 299464 - DNA, 25 bp, probe
ttctttgtttgaattctctaataag

SEQ ID NO: 299465 - DNA, 25 bp, probe
ttcttactgccgattgcttattact

SEQ ID NO: 299466 - DNA, 25 bp, probe
ttcttactgccgattgcttattact

SEQ ID NO: 299467 - DNA, 25 bp, probe
ttcttcagtcctatgtctgtctcta

SEQ ID NO: 299468 - DNA, 25 bp, probe
ttcttcagtcctatgtctgtctcta

SEQ ID NO: 299469 - DNA, 25 bp, probe
ttcatgcttgtggctttgttgtgtt

SEQ ID NO: 299470 - DNA, 25 bp, probe
ttcatgcttgtggctttgttgtgtt

SEQ ID NO: 299471 - DNA, 25 bp, probe
ttcatctctgtggtctgtgttgtcc

SEQ ID NO: 299472 - DNA, 25 bp, probe
ttcatcactctctttgcgctgatgt

SEQ ID NO: 299473 - DNA, 25 bp, probe
ttcttcatccttaactgcatggtcc

SEQ ID NO: 299474 - DNA, 25 bp, probe
ttctatccctgtaagtgcgcagaca

SEQ ID NO: 299475 - DNA, 25 bp, probe
ttctatctacattctattctgcgga

SEQ ID NO: 299476 - DNA, 25 bp, probe
ttcatgatgtacctgttgtcgccgg

SEQ ID NO: 299477 - DNA, 25 bp, probe
ttcgagaacctgctggccaagaaca

SEQ ID NO: 299478 - DNA, 25 bp, probe
ttcgagaacctgctggccaagaaca

SEQ ID NO: 299479 - DNA, 25 bp, probe
ttcgagaacctgctggccaagaaca

SEQ ID NO: 299480 - DNA, 25 bp, probe
ttcgagaacctgctggccaagaaca

SEQ ID NO: 299481 - DNA, 25 bp, probe
ttcggatcacgcccggagtagaagc

SEQ ID NO: 299482 - DNA, 25 bp, probe
ttcttatcatggttcgggcgagcaa

SEQ ID NO: 299483 - DNA, 25 bp, probe
ttcttcctgcagttcctggtgagaa

SEQ ID NO: 299484 - DNA, 25 bp, probe
ttcttactgcagctctctggaaatt

SEQ ID NO: 299485 - DNA, 25 bp, probe
ttcttttgcatgcactttaaaaaca

SEQ ID NO: 299486 - DNA, 25 bp, probe
ttcttgccaggaacttctcaacaaa

SEQ ID NO: 299487 - DNA, 25 bp, probe
ttcattgccgagagccctgcagaat

SEQ ID NO: 299488 - DNA, 25 bp, probe
ttcttcacaggcactcctggagata

SEQ ID NO: 299489 - DNA, 25 bp, probe
ttcttcacaggatcccagcaatgaa

SEQ ID NO: 299490 - DNA, 25 bp, probe
ttcttcacaggatcccagcaatgaa

SEQ ID NO: 299491 - DNA, 25 bp, probe
ttcttcgagaagcccgactatgact

SEQ ID NO: 299492 - DNA, 25 bp, probe
ttcttctggaagctggagctaatgt

SEQ ID NO: 299493 - DNA, 25 bp, probe
ttcttggtcaatcttgactagatta

SEQ ID NO: 299494 - DNA, 25 bp, probe
ttcatttttcttgtacatatgtgta

SEQ ID NO: 299495 - DNA, 25 bp, probe
ttcatttttcttgtacatatgtgta

SEQ ID NO: 299496 - DNA, 25 bp, probe
ttcgttaatcttgctgcttatgtgc

SEQ ID NO: 299497 - DNA, 25 bp, probe
ttcttttacttagtgcatttgtgca

SEQ ID NO: 299498 - DNA, 25 bp, probe
ttcttatgtccttgggattggtgac

SEQ ID NO: 299499 - DNA, 25 bp, probe
ttcttcatccctgggctgttgggag

SEQ ID NO: 299500 - DNA, 25 bp, probe
ttctagctgccatggtggttaggaa

SEQ ID NO: 299501 - DNA, 25 bp, probe
ttctacgccctgaagcgaatcctgt

SEQ ID NO: 299502 - DNA, 25 bp, probe
ttctactcctctgacgaatgggtat

SEQ ID NO: 299503 - DNA, 25 bp, probe
ttctacacagccacggaagggcaat

SEQ ID NO: 299504 - DNA, 25 bp, probe
ttctatccaccaactagtcatgggc

SEQ ID NO: 299505 - DNA, 25 bp, probe
ttcataataccagtgtgatgtcagg

SEQ ID NO: 299506 - DNA, 25 bp, probe
ttcttgatgaccagtatgtcagttc

SEQ ID NO: 299507 - DNA, 25 bp, probe
ttctaggatccaagtttccttattt

SEQ ID NO: 299508 - DNA, 25 bp, probe
ttcgtgggtcattgtttccccattg

SEQ ID NO: 299509 - DNA, 25 bp, probe
ttcttggtattaatttggccgcatt

SEQ ID NO: 299510 - DNA, 25 bp, probe
ttcttggatattacttatgtctaat

SEQ ID NO: 299511 - DNA, 25 bp, probe
ttctcagtaatgtttttgttagctt

SEQ ID NO: 299512 - DNA, 25 bp, probe
ttctcagaaggtgtttggtatggga

SEQ ID NO: 299513 - DNA, 25 bp, probe
ttcatcagccggattttgttattga

SEQ ID NO: 299514 - DNA, 25 bp, probe
ttcatcccatgtcgtgttggttact

SEQ ID NO: 299515 - DNA, 25 bp, probe
ttcatccctgcaaggatctgcagtt

SEQ ID NO: 299516 - DNA, 25 bp, probe
ttcatccctgagggcctgcagtgtt

SEQ ID NO: 299517 - DNA, 25 bp, probe
ttctcaatcttgggacactgaattg

SEQ ID NO: 299518 - DNA, 25 bp, probe
ttctgattccgaagacactgtattt

SEQ ID NO: 299519 - DNA, 25 bp, probe
ttctgtttcatggaacctatgttta

SEQ ID NO: 299520 - DNA, 25 bp, probe
ttctttcctacatggctgaattaga

SEQ ID NO: 299521 - DNA, 25 bp, probe
ttcattcttctccaagagtgcttgc

SEQ ID NO: 299522 - DNA, 25 bp, probe
ttcttgctttcttaattgcatcatt

SEQ ID NO: 299523 - DNA, 25 bp, probe
ttcttcttggtctactgtgaactct

SEQ ID NO: 299524 - DNA, 25 bp, probe
ttcttcctgggctttgcacaggtct

SEQ ID NO: 299525 - DNA, 25 bp, probe
ttcttcatctgtccagttggggtag

SEQ ID NO: 299526 - DNA, 25 bp, probe
ttctctgccttcagtggggaggggg

SEQ ID NO: 299527 - DNA, 25 bp, probe
ttctctgacccaagaatggtgaagt

SEQ ID NO: 299528 - DNA, 25 bp, probe
ttctctgacctactcgagggactta

SEQ ID NO: 299529 - DNA, 25 bp, probe
ttctctgcacctgaacgggagtcca

SEQ ID NO: 299530 - DNA, 25 bp, probe
ttctctgacctcaccttggaggacc

SEQ ID NO: 299531 - DNA, 25 bp, probe
ttctctagcctcgagtccgaggtat

SEQ ID NO: 299532 - DNA, 25 bp, probe
ttcatcttgtcctgtctcgaggatg

SEQ ID NO: 299533 - DNA, 25 bp, probe
ttcatcttgtcctgtctcgaggatg

SEQ ID NO: 299534 - DNA, 25 bp, probe
ttctgtgcatgtgcaggtcgggggt

SEQ ID NO: 299535 - DNA, 25 bp, probe
ttcttgagcatctggtctgggggga

SEQ ID NO: 299536 - DNA, 25 bp, probe
ttctctgaggttcggggggtggaat

SEQ ID NO: 299537 - DNA, 25 bp, probe
ttctctgaggttcggggggtggaat

SEQ ID NO: 299538 - DNA, 25 bp, probe
ttcttcagctttgtggaggagtgga

SEQ ID NO: 299539 - DNA, 25 bp, probe
ttctttctttcggccaggctgaggc

SEQ ID NO: 299540 - DNA, 25 bp, probe
ttctttctttcggccaggctgaggc

SEQ ID NO: 299541 - DNA, 25 bp, probe
ttcctggaaccagccaggccaggca

SEQ ID NO: 299542 - DNA, 25 bp, probe
ttccaggcaatgacgtcgatgacca

SEQ ID NO: 299543 - DNA, 25 bp, probe
ttctcatggaagtcccaatcacaca

SEQ ID NO: 299544 - DNA, 25 bp, probe
ttctcatggaattggcctattggca

SEQ ID NO: 299545 - DNA, 25 bp, probe
ttccaatatgattccacccatggca

SEQ ID NO: 299546 - DNA, 25 bp, probe
ttctaatcttaggcgcttcaggcgg

SEQ ID NO: 299547 - DNA, 25 bp, probe
ttctggatgcttgagtcttaccgta

SEQ ID NO: 299548 - DNA, 25 bp, probe
ttctggatgccagagtccaggctcc

SEQ ID NO: 299549 - DNA, 25 bp, probe
ttcttcaactgcgtgaccaggcatc

SEQ ID NO: 299550 - DNA, 25 bp, probe
ttctgtcacctgatgaatcgtctga

SEQ ID NO: 299551 - DNA, 25 bp, probe
ttcttcattctgctgagcaagtgtg

SEQ ID NO: 299552 - DNA, 25 bp, probe
ttgttacattggcacagagccatgg

SEQ ID NO: 299553 - DNA, 25 bp, probe
ttccaacaggatcacagacctgggc

SEQ ID NO: 299554 - DNA, 25 bp, probe
ttgccaacacgacaagcactggagc

SEQ ID NO: 299555 - DNA, 25 bp, probe
ttctaataagaggatcagccgggtg

SEQ ID NO: 299556 - DNA, 25 bp, probe
ttctactgaggggcctgtggcggtg

SEQ ID NO: 299557 - DNA, 25 bp, probe
ttctaccagaacactgtgggtgatc

SEQ ID NO: 299558 - DNA, 25 bp, probe
ttctaccagaacactgtgggtgatc

SEQ ID NO: 299559 - DNA, 25 bp, probe
ttctttaaaatagtgctgggatgac

SEQ ID NO: 299560 - DNA, 25 bp, probe
ttcttccaaatgtactgttaaataa

SEQ ID NO: 299561 - DNA, 25 bp, probe
ttcatatccaaattacgtaaaaaca

SEQ ID NO: 299562 - DNA, 25 bp, probe
ttcatatccaaattacgtaaaaaca

SEQ ID NO: 299563 - DNA, 25 bp, probe
ttcatatacaaatcacggaagaata

SEQ ID NO: 299564 - DNA, 25 bp, probe
ttctattcacagtacacgtcacagt

SEQ ID NO: 299565 - DNA, 25 bp, probe
ttctcttcacagtcacattccaagc

SEQ ID NO: 299566 - DNA, 25 bp, probe
ttctcaacgcagtaattcccatctg

SEQ ID NO: 299567 - DNA, 25 bp, probe
ttctcacaccaaggcagatgctcct

SEQ ID NO: 299568 - DNA, 25 bp, probe
ttctacgctgcagagatcatttctg

SEQ ID NO: 299569 - DNA, 25 bp, probe
ttcatagcccaggttcttgatcgga

SEQ ID NO: 299570 - DNA, 25 bp, probe
ttctcagccagcctattcttttgga

SEQ ID NO: 299571 - DNA, 25 bp, probe
ttcgacaacctctattactgggacc

SEQ ID NO: 299572 - DNA, 25 bp, probe
ttctgtctcattgtactacggaact

SEQ ID NO: 299573 - DNA, 25 bp, probe
ttcttacttgatgacaacagcgaca

SEQ ID NO: 299574 - DNA, 25 bp, probe
ttcttccattgtgagaccactgcca

SEQ ID NO: 299575 - DNA, 25 bp, probe
ttctctcaatgtgtaacacactgca

SEQ ID NO: 299576 - DNA, 25 bp, probe
ttcttctagtggacagaacatgctg

SEQ ID NO: 299577 - DNA, 25 bp, probe
ttcttcatggtcttcggcatcatgc

SEQ ID NO: 299578 - DNA, 25 bp, probe
ttctttggtcttgagctcatctctc

SEQ ID NO: 299579 - DNA, 25 bp, probe
ttctttggtcttgagctcatctctc

SEQ ID NO: 299580 - DNA, 25 bp, probe
ttctattgggttttctcatcactct

SEQ ID NO: 299581 - DNA, 25 bp, probe
ttctctttggtttctcatcacattt

SEQ ID NO: 299582 - DNA, 25 bp, probe
ttctctttggtttctcatcacattt

SEQ ID NO: 299583 - DNA, 25 bp, probe
ttctctttgggacctaatgactcat

SEQ ID NO: 299584 - DNA, 25 bp, probe
ttctctgtggccaatcccaatgact

SEQ ID NO: 299585 - DNA, 25 bp, probe
ttctctgtggccaatcccaatgact

SEQ ID NO: 299586 - DNA, 25 bp, probe
ttctcattgccagattccattaccc

SEQ ID NO: 299587 - DNA, 25 bp, probe
ttctcagtgccattgcttatcttcc

SEQ ID NO: 299588 - DNA, 25 bp, probe
ttctcggctcttgacacttagccgc

SEQ ID NO: 299589 - DNA, 25 bp, probe
ttctgggctcttgcaagtcacccat

SEQ ID NO: 299590 - DNA, 25 bp, probe
ttcggttcaagaagagccagcgcct

SEQ ID NO: 299591 - DNA, 25 bp, probe
ttcttttctataatgtgcctggctc

SEQ ID NO: 299592 - DNA, 25 bp, probe
ttctatttctcttcttcagtggtgc

SEQ ID NO: 299593 - DNA, 25 bp, probe
ttcttttgcttgtgagaggggaagg

SEQ ID NO: 299594 - DNA, 25 bp, probe
ttcttttttgcaaaggtctgtgata

SEQ ID NO: 299595 - DNA, 25 bp, probe
ttcttgtttataacagtgccttaag

SEQ ID NO: 299596 - DNA, 25 bp, probe
ttctggccatttaactagcacttta

SEQ ID NO: 299597 - DNA, 25 bp, probe
ttctgtgcctttgaatacaaatttc

SEQ ID NO: 299598 - DNA, 25 bp, probe
ttctgatcctttcaatatacgttct

SEQ ID NO: 299599 - DNA, 25 bp, probe
ttcttctccttaattaactgggatg

SEQ ID NO: 299600 - DNA, 25 bp, probe
ttcttctcctttgtcaaatggtatt

SEQ ID NO: 299601 - DNA, 25 bp, probe
ttcattgacctgggcctgcaattgg

SEQ ID NO: 299602 - DNA, 25 bp, probe
ttctctgcccttgggcatcaactgg

SEQ ID NO: 299603 - DNA, 25 bp, probe
ttcttcccttttacatactgctgtc

SEQ ID NO: 299604 - DNA, 25 bp, probe
ttcctccaggttcacaactgtatcc

SEQ ID NO: 299605 - DNA, 25 bp, probe
ttcctccaggttcacaactgtatcc

SEQ ID NO: 299606 - DNA, 25 bp, probe
ttctctctggcgactggaaagtttc

SEQ ID NO: 299607 - DNA, 25 bp, probe
ttcttctgacttaggattggccttt

SEQ ID NO: 299608 - DNA, 25 bp, probe
ttcttgtgacttcggtcttcttgtt

SEQ ID NO: 299609 - DNA, 25 bp, probe
ttctactgcatcaaggtctcttctt

SEQ ID NO: 299610 - DNA, 25 bp, probe
ttcttgcagagcaagggcatcattt

SEQ ID NO: 299611 - DNA, 25 bp, probe
ttcttgatgacttggagctctttcc

SEQ ID NO: 299612 - DNA, 25 bp, probe
ttcattgtaatgcaggcgtttccag

SEQ ID NO: 299613 - DNA, 25 bp, probe
ttctatgttatgccggtggttaatg

SEQ ID NO: 299614 - DNA, 25 bp, probe
ttctctgtttcacgttcgttgagtg

SEQ ID NO: 299615 - DNA, 25 bp, probe
ttcttctttacactatccctaatta

SEQ ID NO: 299616 - DNA, 25 bp, probe
ttcttctttacactatccctaatta

SEQ ID NO: 299617 - DNA, 25 bp, probe
ttcattttttctcatcccatgactt

SEQ ID NO: 299618 - DNA, 25 bp, probe
ttctttttctgccaattcagagatt

SEQ ID NO: 299619 - DNA, 25 bp, probe
ttcattttcctgcacattctgtcaa

SEQ ID NO: 299620 - DNA, 25 bp, probe
ttctttatcaagcatccatctgact

SEQ ID NO: 299621 - DNA, 25 bp, probe
ttcatttacacagatatccatgcct

SEQ ID NO: 299622 - DNA, 25 bp, probe
ttctctgtagaagtgatcctcaccc

SEQ ID NO: 299623 - DNA, 25 bp, probe
ttctgtgtcaaagaagtgcagaacg

SEQ ID NO: 299624 - DNA, 25 bp, probe
ttcgctgaaaggcatcggtgccacg

SEQ ID NO: 299625 - DNA, 25 bp, probe
ttcctgacaaccgatctggtctgtt

SEQ ID NO: 299626 - DNA, 25 bp, probe
ttctggctgcaaaggtctgagttat

SEQ ID NO: 299627 - DNA, 25 bp, probe
ttctcactggcaagctcttgcagtt

SEQ ID NO: 299628 - DNA, 25 bp, probe
ttcttttgcatgactgtggcctgtt

SEQ ID NO: 299629 - DNA, 25 bp, probe
ttcttttgcatgactgtggcctgtt

SEQ ID NO: 299630 - DNA, 25 bp, probe
ttcttcttgcaattgtccatgtgtt

SEQ ID NO: 299631 - DNA, 25 bp, probe
ttcttcttgcaattgtccatgtgtt

SEQ ID NO: 299632 - DNA, 25 bp, probe
ttctgttgctgccatttccagttat

SEQ ID NO: 299633 - DNA, 25 bp, probe
ttctgttgagaaattgcctctgaaa

SEQ ID NO: 299634 - DNA, 25 bp, probe
ttctctataacaatcgtatggaaga

SEQ ID NO: 299635 - DNA, 25 bp, probe
ttctctataacaatcgtatggaaga

SEQ ID NO: 299636 - DNA, 25 bp, probe
ttctctgaagaactgtggctggaaa

SEQ ID NO: 299637 - DNA, 25 bp, probe
ttctctgaagaactgtggctggaaa

SEQ ID NO: 299638 - DNA, 25 bp, probe
ttctcagtcagaggctgatgccgga

SEQ ID NO: 299639 - DNA, 25 bp, probe
ttctcagataggggcacccaagcta

SEQ ID NO: 299640 - DNA, 25 bp, probe
ttctcagttctgggaagcctagtac

SEQ ID NO: 299641 - DNA, 25 bp, probe
ttctcattactgtctgtggctaagt

SEQ ID NO: 299642 - DNA, 25 bp, probe
ttcttgcatccttctgtgattcaaa

SEQ ID NO: 299643 - DNA, 25 bp, probe
ttcttgtagctactatattccagac

SEQ ID NO: 299644 - DNA, 25 bp, probe
ttgcattggaccgaatcctccagca

SEQ ID NO: 299645 - DNA, 25 bp, probe
ttgcttgagacctagcaatcagtca

SEQ ID NO: 299646 - DNA, 25 bp, probe
ttcttaatctgaagcttcactcact

SEQ ID NO: 299647 - DNA, 25 bp, probe
ttcttacatcagatgtttctttgca

SEQ ID NO: 299648 - DNA, 25 bp, probe
ttctaaatcagcttgatactcttta

SEQ ID NO: 299649 - DNA, 25 bp, probe
ttctcaaatgcggcttcgctttgtg

SEQ ID NO: 299650 - DNA, 25 bp, probe
ttctcaaatgcggcttcgctttgtg

SEQ ID NO: 299651 - DNA, 25 bp, probe
ttctccaagggccatcagtgtcttg

SEQ ID NO: 299652 - DNA, 25 bp, probe
ttcctcaatggggaggtgcagctgg

SEQ ID NO: 299653 - DNA, 25 bp, probe
ttcctagagggcaaggagccgtcag

SEQ ID NO: 299654 - DNA, 25 bp, probe
ttccaaagggccaggccgagctgac

SEQ ID NO: 299655 - DNA, 25 bp, probe
ttcccagaaggcccggcttggaaca

SEQ ID NO: 299656 - DNA, 25 bp, probe
ttggcaaaaggcctggggtgtacac

SEQ ID NO: 299657 - DNA, 25 bp, probe
ttccataaatggggtcgagaatcaa

SEQ ID NO: 299658 - DNA, 25 bp, probe
ttctttaaggctcccaacaatgcta

SEQ ID NO: 299659 - DNA, 25 bp, probe
ttctctgaataggtcccaaacttaa

SEQ ID NO: 299660 - DNA, 25 bp, probe
ttccgcaaactggccgagaagctgg

SEQ ID NO: 299661 - DNA, 25 bp, probe
ttcggacaatcgaccgaaagcaaga

SEQ ID NO: 299662 - DNA, 25 bp, probe
ttctgggcataagtcctgcaaggaa

SEQ ID NO: 299663 - DNA, 25 bp, probe
ttctgtggagtgatcccagaggcaa

SEQ ID NO: 299664 - DNA, 25 bp, probe
ttctggcgggagtctcagccgaaga

SEQ ID NO: 299665 - DNA, 25 bp, probe
ttctggggaagactattccagagac

SEQ ID NO: 299666 - DNA, 25 bp, probe
ttctggaggaaccgcaagccggaga

SEQ ID NO: 299667 - DNA, 25 bp, probe
ttcggaggaacccagagcggaggct

SEQ ID NO: 299668 - DNA, 25 bp, probe
ttcggaggaacccagagcggaggct

SEQ ID NO: 299669 - DNA, 25 bp, probe
ttcggaggaacctgagtgcctcagt

SEQ ID NO: 299670 - DNA, 25 bp, probe
ttcggaggaacctgagtgcctcagt

SEQ ID NO: 299671 - DNA, 25 bp, probe
ttcttatcgaattttggagcctaat

SEQ ID NO: 299672 - DNA, 25 bp, probe
ttctttccaaatgctggagtctgaa

SEQ ID NO: 299673 - DNA, 25 bp, probe
ttctttccaggctctagggcaagaa

SEQ ID NO: 299674 - DNA, 25 bp, probe
ttctttccaggctctttgtatgaga

SEQ ID NO: 299675 - DNA, 25 bp, probe
ttcttctccagtgttcatcttatga

SEQ ID NO: 299676 - DNA, 25 bp, probe
ttcttctccatttatatcatcgttg

SEQ ID NO: 299677 - DNA, 25 bp, probe
ttcttctccatttatatcatcgttg

SEQ ID NO: 299678 - DNA, 25 bp, probe
ttcttccacatatgctggctgctgt

SEQ ID NO: 299679 - DNA, 25 bp, probe
ttcttccatcaactcatggcagggg

SEQ ID NO: 299680 - DNA, 25 bp, probe
ttcttcgcaagactatggaaaggaa

SEQ ID NO: 299681 - DNA, 25 bp, probe
ttcttccagagaaataaagttagtt

SEQ ID NO: 299682 - DNA, 25 bp, probe
ttctccccaacataattatttcatt

SEQ ID NO: 299683 - DNA, 25 bp, probe
ttcccccaaagccatgagtttcttg

SEQ ID NO: 299684 - DNA, 25 bp, probe
ttcttttaaacggagtcttgctata

SEQ ID NO: 299685 - DNA, 25 bp, probe
ttctttggaaactcacactcgctta

SEQ ID NO: 299686 - DNA, 25 bp, probe
ttctcttggcaatcagaaggctgcc

SEQ ID NO: 299687 - DNA, 25 bp, probe
ttcttgatggaaccagatccctgcc

SEQ ID NO: 299688 - DNA, 25 bp, probe
ttcttgggagagtcactccagccct

SEQ ID NO: 299689 - DNA, 25 bp, probe
ttccccgagcagtaattggcccggc

SEQ ID NO: 299690 - DNA, 25 bp, probe
ttcccctaaataatgtgctctccgg

SEQ ID NO: 299691 - DNA, 25 bp, probe
ttcccgtgcaaaaagggtcacgcct

SEQ ID NO: 299692 - DNA, 25 bp, probe
ttcttggctcattaaagggctaatg

SEQ ID NO: 299693 - DNA, 25 bp, probe
ttcttcagtcgatatatgggctatt

SEQ ID NO: 299694 - DNA, 25 bp, probe
ttcttggctcttttgggccttttag

SEQ ID NO: 299695 - DNA, 25 bp, probe
ttcttagtttgcttgtggcctctta

SEQ ID NO: 299696 - DNA, 25 bp, probe
ttcttggtctactgtgaactcttac

SEQ ID NO: 299697 - DNA, 25 bp, probe
ttctggtgttactggtttcttacat

SEQ ID NO: 299698 - DNA, 25 bp, probe
ttctgaggtttcaggtccctgtgaa

SEQ ID NO: 299699 - DNA, 25 bp, probe
ttctgaggtttcaggtccctgtgaa

SEQ ID NO: 299700 - DNA, 25 bp, probe
ttcgagtgtttcagtgcttcgcaga

SEQ ID NO: 299701 - DNA, 25 bp, probe
ttcgggtcatggcagactctatgca

SEQ ID NO: 299702 - DNA, 25 bp, probe
ttcgaggttgcactggactgcaagc

SEQ ID NO: 299703 - DNA, 25 bp, probe
ttctggggcacactggagccatggc

SEQ ID NO: 299704 - DNA, 25 bp, probe
ttctgtggtgcattctacagcgaga

SEQ ID NO: 299705 - DNA, 25 bp, probe
ttctgggtttgctgtggggacctga

SEQ ID NO: 299706 - DNA, 25 bp, probe
ttctgggtacctctggttagcactt

SEQ ID NO: 299707 - DNA, 25 bp, probe
ttctcggtacttaggacttgatcct

SEQ ID NO: 299708 - DNA, 25 bp, probe
ttctcctgtacttgaccacattgaa

SEQ ID NO: 299709 - DNA, 25 bp, probe
ttctcctgtacttgaccacattgaa

SEQ ID NO: 299710 - DNA, 25 bp, probe
ttctggctgtatatgaacatcatat

SEQ ID NO: 299711 - DNA, 25 bp, probe
ttctggctgtagagcacccagccaa

SEQ ID NO: 299712 - DNA, 25 bp, probe
ttctggctgtagagcacccagccaa

SEQ ID NO: 299713 - DNA, 25 bp, probe
ttctggcatttatagtccccaacct

SEQ ID NO: 299714 - DNA, 25 bp, probe
ttctggcatttatagtccccaacct

SEQ ID NO: 299715 - DNA, 25 bp, probe
ttgctggcagtggaaagtcagtggc

SEQ ID NO: 299716 - DNA, 25 bp, probe
ttgctggcagtggaaagtcagtggc

SEQ ID NO: 299717 - DNA, 25 bp, probe
ttctatgagatggccacaggccgtc

SEQ ID NO: 299718 - DNA, 25 bp, probe
ttgcaaggttctacaggcgcggcag

SEQ ID NO: 299719 - DNA, 25 bp, probe
ttgcaactggcctggccgcaacagc

SEQ ID NO: 299720 - DNA, 25 bp, probe
ttctactggccatgatgccactgaa

SEQ ID NO: 299721 - DNA, 25 bp, probe
ttctcagttatctgatgtccagaac

SEQ ID NO: 299722 - DNA, 25 bp, probe
ttctcattgtctttttgcatcagta

SEQ ID NO: 299723 - DNA, 25 bp, probe
ttctcattgtctttttgcatcagta

SEQ ID NO: 299724 - DNA, 25 bp, probe
ttctttgactcatttggactgaatt

SEQ ID NO: 299725 - DNA, 25 bp, probe
ttcttgcagccgtgtggacgaagtt

SEQ ID NO: 299726 - DNA, 25 bp, probe
ttcttcatgcgcctggtggggaaga

SEQ ID NO: 299727 - DNA, 25 bp, probe
ttctaccctgtggtgaaggagcagt

SEQ ID NO: 299728 - DNA, 25 bp, probe
ttctattcctgaggtgcagcgggga

SEQ ID NO: 299729 - DNA, 25 bp, probe
ttctatttctatgtgagtaccagca

SEQ ID NO: 299730 - DNA, 25 bp, probe
ttctgtgtatctaggtggacctcac

SEQ ID NO: 299731 - DNA, 25 bp, probe
ttctgtgtatctaggtggacctcac

SEQ ID NO: 299732 - DNA, 25 bp, probe
ttctggaagctccctagaatctcct

SEQ ID NO: 299733 - DNA, 25 bp, probe
ttcttgatactttccaaattctctg

SEQ ID NO: 299734 - DNA, 25 bp, probe
ttctcttactatactcatacatttt

SEQ ID NO: 299735 - DNA, 25 bp, probe
ttctcctactaactagcttcttatc

SEQ ID NO: 299736 - DNA, 25 bp, probe
ttctactccttacttgctattttat

SEQ ID NO: 299737 - DNA, 25 bp, probe
ttctcactcctacctggtaatttaa

SEQ ID NO: 299738 - DNA, 25 bp, probe
ttctactcatgttgccatttaatgc

SEQ ID NO: 299739 - DNA, 25 bp, probe
ttccctcagtgtctttattccaaaa

SEQ ID NO: 299740 - DNA, 25 bp, probe
ttcccaggcaggcttttcattcaaa

SEQ ID NO: 299741 - DNA, 25 bp, probe
ttcccagagtgggctttggtggcca

SEQ ID NO: 299742 - DNA, 25 bp, probe
ttcctcaacctggtgattactgtcc

SEQ ID NO: 299743 - DNA, 25 bp, probe
ttccctacgggtgtacagctgcacc

SEQ ID NO: 299744 - DNA, 25 bp, probe
ttccctacgggtgtacagctgcacc

SEQ ID NO: 299745 - DNA, 25 bp, probe
ttcccttcaagagcacttcacatac

SEQ ID NO: 299746 - DNA, 25 bp, probe
ttccctaaaagtacccagcaagcct

SEQ ID NO: 299747 - DNA, 25 bp, probe
ttctgcctgaaaagtcccaaggaga

SEQ ID NO: 299748 - DNA, 25 bp, probe
ttctgccgccagtgatgacggagga

SEQ ID NO: 299749 - DNA, 25 bp, probe
ttctctgcccagcgaagcaggagta

SEQ ID NO: 299750 - DNA, 25 bp, probe
ttcttcccatagtgtgagcagcatt

SEQ ID NO: 299751 - DNA, 25 bp, probe
ttctctctgacttgtttacatcatt

SEQ ID NO: 299752 - DNA, 25 bp, probe
ttctctccattgctattaaatgtag

SEQ ID NO: 299753 - DNA, 25 bp, probe
ttcttcctcctaatcaacaactcag

SEQ ID NO: 299754 - DNA, 25 bp, probe
ttcttcactcttttacacaatcatc

SEQ ID NO: 299755 - DNA, 25 bp, probe
ttctgttcactatcacaaaatcatc

SEQ ID NO: 299756 - DNA, 25 bp, probe
ttcttacacattccatcttacatta

SEQ ID NO: 299757 - DNA, 25 bp, probe
ttctagacaattctctattttactg

SEQ ID NO: 299758 - DNA, 25 bp, probe
ttctatgaaaatgtgctctgttgtc

SEQ ID NO: 299759 - DNA, 25 bp, probe
ttctgatgaacagcctgtccttctg

SEQ ID NO: 299760 - DNA, 25 bp, probe
ttcttcacacccattacattgtggg

SEQ ID NO: 299761 - DNA, 25 bp, probe
ttcttcacacccattacattgtggg

SEQ ID NO: 299762 - DNA, 25 bp, probe
ttcccgacaccagaagctgttggga

SEQ ID NO: 299763 - DNA, 25 bp, probe
ttccctgaattatatttgggggcaa

SEQ ID NO: 299764 - DNA, 25 bp, probe
ttccctccttggtcattttggtgtg

SEQ ID NO: 299765 - DNA, 25 bp, probe
ttccccacttggcctgagttaggcc

SEQ ID NO: 299766 - DNA, 25 bp, probe
ttcctcacctggagggttggaccca

SEQ ID NO: 299767 - DNA, 25 bp, probe
ttccccgcatggtgggtagatgggc

SEQ ID NO: 299768 - DNA, 25 bp, probe
ttctccccagagtcaccgggaggag

SEQ ID NO: 299769 - DNA, 25 bp, probe
ttgaactcactccctcacggggaga

SEQ ID NO: 299770 - DNA, 25 bp, probe
ttgaactcactccctcacggggaga

SEQ ID NO: 299771 - DNA, 25 bp, probe
ttcttcgagtccgtcacgtgggaga

SEQ ID NO: 299772 - DNA, 25 bp, probe
ttcccagagtcatcctcgggtgatg

SEQ ID NO: 299773 - DNA, 25 bp, probe
ttctcacagggacccaggtggctgt

SEQ ID NO: 299774 - DNA, 25 bp, probe
ttctcacagggacccaggtggctgt

SEQ ID NO: 299775 - DNA, 25 bp, probe
ttcccagggagcacagggtcgatgt

SEQ ID NO: 299776 - DNA, 25 bp, probe
ttccggggatggcatcggtgcttgg

SEQ ID NO: 299777 - DNA, 25 bp, probe
ttccggggatggcatcggtgcttgg

SEQ ID NO: 299778 - DNA, 25 bp, probe
ttcctaggggcctcgtgatctgagg

SEQ ID NO: 299779 - DNA, 25 bp, probe
ttcgtggggaaccgcgagatagggc

SEQ ID NO: 299780 - DNA, 25 bp, probe
ttcccgggcaagaacgatattgaac

SEQ ID NO: 299781 - DNA, 25 bp, probe
ttcccgggcaagaacgatattgaac

SEQ ID NO: 299782 - DNA, 25 bp, probe
ttccgaggcccacactggtgtgaat

SEQ ID NO: 299783 - DNA, 25 bp, probe
ttccgaggccaataaagtgctcacg

SEQ ID NO: 299784 - DNA, 25 bp, probe
ttccgtggatgtttaccaggtagcc

SEQ ID NO: 299785 - DNA, 25 bp, probe
ttctctttgagtactaccggggctt

SEQ ID NO: 299786 - DNA, 25 bp, probe
ttcttattgaatactatcttgggtt

SEQ ID NO: 299787 - DNA, 25 bp, probe
ttctcaaggaatctcactcttactt

SEQ ID NO: 299788 - DNA, 25 bp, probe
ttctaagctgtgactaactcttttt

SEQ ID NO: 299789 - DNA, 25 bp, probe
ttgccaagccatattgagttatttt

SEQ ID NO: 299790 - DNA, 25 bp, probe
ttctcacctgctccaggaggtttgc

SEQ ID NO: 299791 - DNA, 25 bp, probe
ttccacctgcccaggtgttacctgc

SEQ ID NO: 299792 - DNA, 25 bp, probe
ttcggcctgtccaggtatgtcctgg

SEQ ID NO: 299793 - DNA, 25 bp, probe
ttctggctgttctaaagttggcctg

SEQ ID NO: 299794 - DNA, 25 bp, probe
ttctaggtatcttaatgtgtggata

SEQ ID NO: 299795 - DNA, 25 bp, probe
ttctcaggattctttcagctgggaa

SEQ ID NO: 299796 - DNA, 25 bp, probe
ttctgcaagcgttgcctggatgcgg

SEQ ID NO: 299797 - DNA, 25 bp, probe
ttctgcgggtcggcagcatatgcag

SEQ ID NO: 299798 - DNA, 25 bp, probe
ttctgcgagagcagctgccacatgc

SEQ ID NO: 299799 - DNA, 25 bp, probe
ttctctcaggcttgctgccaaaagc

SEQ ID NO: 299800 - DNA, 25 bp, probe
ttctcataagattctctcatcaaat

SEQ ID NO: 299801 - DNA, 25 bp, probe
ttctcaaagtgatctgatatttgga

SEQ ID NO: 299802 - DNA, 25 bp, probe
ttctcaaagtgatctgatatttgga

SEQ ID NO: 299803 - DNA, 25 bp, probe
ttctgcttaagctctagtttggact

SEQ ID NO: 299804 - DNA, 25 bp, probe
ttctcactaatctctccatcttaga

SEQ ID NO: 299805 - DNA, 25 bp, probe
ttctcaatattatccgcatcctggt

SEQ ID NO: 299806 - DNA, 25 bp, probe
ttctcagctataaattgcgctctca

SEQ ID NO: 299807 - DNA, 25 bp, probe
ttctgcgcacattccattagctata

SEQ ID NO: 299808 - DNA, 25 bp, probe
ttctggcaatcattaaagtgcatag

SEQ ID NO: 299809 - DNA, 25 bp, probe
ttctgctgccactagtactgaaagc

SEQ ID NO: 299810 - DNA, 25 bp, probe
ttctctgcctcacatagcttacaag

SEQ ID NO: 299811 - DNA, 25 bp, probe
ttctgccggcagatatgtttcaaga

SEQ ID NO: 299812 - DNA, 25 bp, probe
ttccaccagtgatttgtattaagac

SEQ ID NO: 299813 - DNA, 25 bp, probe
ttctctagcataatttgtattgaaa

SEQ ID NO: 299814 - DNA, 25 bp, probe
ttctctagagtcagtcattatgaaa

SEQ ID NO: 299815 - DNA, 25 bp, probe
ttctctagtgtaatgtttgctggga

SEQ ID NO: 299816 - DNA, 25 bp, probe
ttctccatttatatcatcgttggaa

SEQ ID NO: 299817 - DNA, 25 bp, probe
ttctccattttttctatgcattcgg

SEQ ID NO: 299818 - DNA, 25 bp, probe
ttctcctacttctatccgaactgga

SEQ ID NO: 299819 - DNA, 25 bp, probe
ttctcctacttctatccgaactgga

SEQ ID NO: 299820 - DNA, 25 bp, probe
ttctcttagttcttctctaacatag

SEQ ID NO: 299821 - DNA, 25 bp, probe
ttctcttagttcttctctaacatag

SEQ ID NO: 299822 - DNA, 25 bp, probe
ttccttagtttctgtaagcctgtta

SEQ ID NO: 299823 - DNA, 25 bp, probe
ttcctggactttctcagaaggtgtt

SEQ ID NO: 299824 - DNA, 25 bp, probe
ttcggtgatctttggtctgaagggc

SEQ ID NO: 299825 - DNA, 25 bp, probe
ttctttgcactttggatgctgaaat

SEQ ID NO: 299826 - DNA, 25 bp, probe
ttctatatgaatatggatctgccat

SEQ ID NO: 299827 - DNA, 25 bp, probe
ttctgactagacttgtgatatgcgt

SEQ ID NO: 299828 - DNA, 25 bp, probe
ttctacaatgagctgcgtgtggctc

SEQ ID NO: 299829 - DNA, 25 bp, probe
ttcttcttgcagagcaagggcatca

SEQ ID NO: 299830 - DNA, 25 bp, probe
ttctacgatgagtgcaagagacgct

SEQ ID NO: 299831 - DNA, 25 bp, probe
ttctacagcgagaggcgagatcagt

SEQ ID NO: 299832 - DNA, 25 bp, probe
ttctccactgtgaagggcgtcaatc

SEQ ID NO: 299833 - DNA, 25 bp, probe
ttcccagctgtgtaaaaacaataaa

SEQ ID NO: 299834 - DNA, 25 bp, probe
ttctccctagttagacacaccaagc

SEQ ID NO: 299835 - DNA, 25 bp, probe
ttcttttactgacacatgaccaatc

SEQ ID NO: 299836 - DNA, 25 bp, probe
ttctacttactaccagcaatgcaaa

SEQ ID NO: 299837 - DNA, 25 bp, probe
ttctacttatcttagcactcaaata

SEQ ID NO: 299838 - DNA, 25 bp, probe
ttctacttatcttagcactcaaata

SEQ ID NO: 299839 - DNA, 25 bp, probe
ttctacatacaagacttcaccataa

SEQ ID NO: 299840 - DNA, 25 bp, probe
ttctccagaaagtactccctcagta

SEQ ID NO: 299841 - DNA, 25 bp, probe
ttctccagaaagtactccctcagta

SEQ ID NO: 299842 - DNA, 25 bp, probe
ttcttcaagggatttccctgtctca

SEQ ID NO: 299843 - DNA, 25 bp, probe
ttctttcaggaatttgccactggca

SEQ ID NO: 299844 - DNA, 25 bp, probe
ttctttcaggaatttgccactggca

SEQ ID NO: 299845 - DNA, 25 bp, probe
ttctttcaggaagtcttccagcaac

SEQ ID NO: 299846 - DNA, 25 bp, probe
ttctgatccaggactatttccgcaa

SEQ ID NO: 299847 - DNA, 25 bp, probe
ttctgtacggatttgctctccggaa

SEQ ID NO: 299848 - DNA, 25 bp, probe
ttctgaacagcctatgctgctgccc

SEQ ID NO: 299849 - DNA, 25 bp, probe
ttctgcaatgcaggcatcatcaggg

SEQ ID NO: 299850 - DNA, 25 bp, probe
ttctgctatgtgacttgcatcgtgg

SEQ ID NO: 299851 - DNA, 25 bp, probe
ttctcttgtccaggcatcagaggcg

SEQ ID NO: 299852 - DNA, 25 bp, probe
ttctttgtcatcagcttcaggcaca

SEQ ID NO: 299853 - DNA, 25 bp, probe
ttctgggtctgcaagtctagacaac

SEQ ID NO: 299854 - DNA, 25 bp, probe
ttctgggccctaaaagcaaacaaat

SEQ ID NO: 299855 - DNA, 25 bp, probe
ttgaccccacttgaagcaaacaata

SEQ ID NO: 299856 - DNA, 25 bp, probe
ttgcccaaggttgaagcaatgaata

SEQ ID NO: 299857 - DNA, 25 bp, probe
ttgtccatagagatctgacaccaaa

SEQ ID NO: 299858 - DNA, 25 bp, probe
ttctcctccaggtctgacaagaaag

SEQ ID NO: 299859 - DNA, 25 bp, probe
ttctcctccaggtctgacaagaaag

SEQ ID NO: 299860 - DNA, 25 bp, probe
ttcccatcaagttctaaaaagtctg

SEQ ID NO: 299861 - DNA, 25 bp, probe
ttctcatataagtttaaccacactt

SEQ ID NO: 299862 - DNA, 25 bp, probe
ttctaacatatgtattaagccaaac

SEQ ID NO: 299863 - DNA, 25 bp, probe
ttctaccaatgtattgtccacagtc

SEQ ID NO: 299864 - DNA, 25 bp, probe
ttctgacaaaaagtttccatatgtt

SEQ ID NO: 299865 - DNA, 25 bp, probe
ttccgctcaaaagttaaagtgctat

SEQ ID NO: 299866 - DNA, 25 bp, probe
ttcctgctgcaaaaccaagaagcca

SEQ ID NO: 299867 - DNA, 25 bp, probe
ttcctgctgcaaaaccaagaagcca

SEQ ID NO: 299868 - DNA, 25 bp, probe
ttctttgccagaacacaagacacca

SEQ ID NO: 299869 - DNA, 25 bp, probe
ttctccccagaagcagaggcagcca

SEQ ID NO: 299870 - DNA, 25 bp, probe
ttctctctggaaaccatggaggcca

SEQ ID NO: 299871 - DNA, 25 bp, probe
ttcccggcaatgatgtcgatgacca

SEQ ID NO: 299872 - DNA, 25 bp, probe
ttctctcgtgggagacgcaggcaca

SEQ ID NO: 299873 - DNA, 25 bp, probe
ttctcctgttggctcacagggctga

SEQ ID NO: 299874 - DNA, 25 bp, probe
ttctcccatctcaggcaaggtgtag

SEQ ID NO: 299875 - DNA, 25 bp, probe
ttctctcctatcagtgtatgctgtt

SEQ ID NO: 299876 - DNA, 25 bp, probe
ttcttacatcatgagtggactttgc

SEQ ID NO: 299877 - DNA, 25 bp, probe
ttctctgcctatgggatgggcccag

SEQ ID NO: 299878 - DNA, 25 bp, probe
ttcctccaaggctgtgatgcccaca

SEQ ID NO: 299879 - DNA, 25 bp, probe
ttccttcaagatcatgtaccccaat

SEQ ID NO: 299880 - DNA, 25 bp, probe
ttctcttcacggctgtaccagaaaa

SEQ ID NO: 299881 - DNA, 25 bp, probe
ttctccttgaggcttctaaataaat

SEQ ID NO: 299882 - DNA, 25 bp, probe
ttctgttcatttcgtttaattaaag

SEQ ID NO: 299883 - DNA, 25 bp, probe
ttctatctgtgtacttttttttaag

SEQ ID NO: 299884 - DNA, 25 bp, probe
ttctgacattgtctggctttctttc

SEQ ID NO: 299885 - DNA, 25 bp, probe
ttctgacattgtctggctttctttc

SEQ ID NO: 299886 - DNA, 25 bp, probe
ttctgaacgtggcactcttctgttc

SEQ ID NO: 299887 - DNA, 25 bp, probe
ttcttactggcgtcaatcttcgccc

SEQ ID NO: 299888 - DNA, 25 bp, probe
ttcttagtgtgccacttgcttgcca

SEQ ID NO: 299889 - DNA, 25 bp, probe
ttctagaattggtttgctctgatca

SEQ ID NO: 299890 - DNA, 25 bp, probe
ttctcagaatctgatgctttctgat

SEQ ID NO: 299891 - DNA, 25 bp, probe
ttctcagatgactctgtgtttttat

SEQ ID NO: 299892 - DNA, 25 bp, probe
ttctcattgctacagtgtattggtt

SEQ ID NO: 299893 - DNA, 25 bp, probe
ttctttgcaatgcattgtatggctt

SEQ ID NO: 299894 - DNA, 25 bp, probe
ttctatttccgtggctatggcttgg

SEQ ID NO: 299895 - DNA, 25 bp, probe
ttcgatttccctatgattcatgggg

SEQ ID NO: 299896 - DNA, 25 bp, probe
ttcgctattcccaggcagggaggga

SEQ ID NO: 299897 - DNA, 25 bp, probe
ttcgctattcccaggcagggaggga

SEQ ID NO: 299898 - DNA, 25 bp, probe
ttcgcatcaataccaagggtgttgg

SEQ ID NO: 299899 - DNA, 25 bp, probe
ttcgcatcaataccaagggtgttgg

SEQ ID NO: 299900 - DNA, 25 bp, probe
ttgaggaaatgcgaaaggttgtatg

SEQ ID NO: 299901 - DNA, 25 bp, probe
ttgggaaagcaggaactgagttcat

SEQ ID NO: 299902 - DNA, 25 bp, probe
ttggggaccagcacactactaaatg

SEQ ID NO: 299903 - DNA, 25 bp, probe
ttctggataccaattacaacataaa

SEQ ID NO: 299904 - DNA, 25 bp, probe
ttctggtactctgtgaaagaagaga

SEQ ID NO: 299905 - DNA, 25 bp, probe
ttcggaagctggggacacggcagtg

SEQ ID NO: 299906 - DNA, 25 bp, probe
ttcggaagctggggacacggcagtg

SEQ ID NO: 299907 - DNA, 25 bp, probe
ttcggagaggcgagagccctgaagg

SEQ ID NO: 299908 - DNA, 25 bp, probe
ttgagggaccagagacccggcatgg

SEQ ID NO: 299909 - DNA, 25 bp, probe
ttgagggaccagagacccggcatgg

SEQ ID NO: 299910 - DNA, 25 bp, probe
ttgagacgactcacaaccaggttgc

SEQ ID NO: 299911 - DNA, 25 bp, probe
ttcccagatcgcacaagggggctgc

SEQ ID NO: 299912 - DNA, 25 bp, probe
ttcccgagaccctgtgggagctggg

SEQ ID NO: 299913 - DNA, 25 bp, probe
ttcccaaaccggtggagcagtgatg

SEQ ID NO: 299914 - DNA, 25 bp, probe
ttcccagagacccggggatggattg

SEQ ID NO: 299915 - DNA, 25 bp, probe
ttcgtctagacacagcacggcagga

SEQ ID NO: 299916 - DNA, 25 bp, probe
ttgtcccagactcgaagccgaggct

SEQ ID NO: 299917 - DNA, 25 bp, probe
ttctggccagacagactcctaacca

SEQ ID NO: 299918 - DNA, 25 bp, probe
ttctgatctcagataactcagtaca

SEQ ID NO: 299919 - DNA, 25 bp, probe
ttcgacgaacactacgagtaccggc

SEQ ID NO: 299920 - DNA, 25 bp, probe
ttcccaagagcctccagtagacgac

SEQ ID NO: 299921 - DNA, 25 bp, probe
ttccgcaaggacttccatggcgagc

SEQ ID NO: 299922 - DNA, 25 bp, probe
ttcggaagtgtcttcctgatcgccc

SEQ ID NO: 299923 - DNA, 25 bp, probe
ttcggaagattctctgtatcaaaca

SEQ ID NO: 299924 - DNA, 25 bp, probe
ttcggtcaattgtcactgtcatcag

SEQ ID NO: 299925 - DNA, 25 bp, probe
ttcgtgtcagatgtggatatccaga

SEQ ID NO: 299926 - DNA, 25 bp, probe
ttctgtgtcaaactgtttagcaaat

SEQ ID NO: 299927 - DNA, 25 bp, probe
ttctggatgcaacgtctttacaacc

SEQ ID NO: 299928 - DNA, 25 bp, probe
ttctggtgccacaactgtttatcct

SEQ ID NO: 299929 - DNA, 25 bp, probe
ttctggggccaagtgtgtgctcacc

SEQ ID NO: 299930 - DNA, 25 bp, probe
ttccaggagccagagaacccgctat

SEQ ID NO: 299931 - DNA, 25 bp, probe
ttctcgggtgaagaactgccgtttg

SEQ ID NO: 299932 - DNA, 25 bp, probe
ttctctgggaaatctactcctttgg

SEQ ID NO: 299933 - DNA, 25 bp, probe
ttctctggtaatattgacttgtata

SEQ ID NO: 299934 - DNA, 25 bp, probe
ttcctgccgattgttgacttgctag

SEQ ID NO: 299935 - DNA, 25 bp, probe
ttcctgccgattgttgacttgctag

SEQ ID NO: 299936 - DNA, 25 bp, probe
ttctctgcagagtttgttgacttta

SEQ ID NO: 299937 - DNA, 25 bp, probe
ttctcgctattttatagtcgtgcca

SEQ ID NO: 299938 - DNA, 25 bp, probe
ttctgctgttttgaagattgtcgaa

SEQ ID NO: 299939 - DNA, 25 bp, probe
ttctgctgtctactccaagaaacca

SEQ ID NO: 299940 - DNA, 25 bp, probe
ttctgatgtcagaatcctgggaacc

SEQ ID NO: 299941 - DNA, 25 bp, probe
ttctgagctctatccagggtcataa

SEQ ID NO: 299942 - DNA, 25 bp, probe
ttctgtatgttttcatgggtcagga

SEQ ID NO: 299943 - DNA, 25 bp, probe
ttctgtatagttttcacctctgaga

SEQ ID NO: 299944 - DNA, 25 bp, probe
ttcgatgatgaatttaccgcccagt

SEQ ID NO: 299945 - DNA, 25 bp, probe
ttctgtgatatcatggaacccaagt

SEQ ID NO: 299946 - DNA, 25 bp, probe
ttctgtgatatcatggaacccaagt

SEQ ID NO: 299947 - DNA, 25 bp, probe
ttctgtgtacataaagtcatcaaag

SEQ ID NO: 299948 - DNA, 25 bp, probe
ttctttgtcataaatcacaataagt

SEQ ID NO: 299949 - DNA, 25 bp, probe
ttctccctcaagaacacaaacgttt

SEQ ID NO: 299950 - DNA, 25 bp, probe
ttgtcttgctgctgtaaaaggcctt

SEQ ID NO: 299951 - DNA, 25 bp, probe
ttgttcttccgatatcagagacttt

SEQ ID NO: 299952 - DNA, 25 bp, probe
ttctcagctttggacattaggtctt

SEQ ID NO: 299953 - DNA, 25 bp, probe
ttgctatgtgcttcgcatcttgggc

SEQ ID NO: 299954 - DNA, 25 bp, probe
ttctatggcactggccttggggtct

SEQ ID NO: 299955 - DNA, 25 bp, probe
ttctatggcaccctcagttgggtct

SEQ ID NO: 299956 - DNA, 25 bp, probe
ttctatggaccacagattggcctcc

SEQ ID NO: 299957 - DNA, 25 bp, probe
ttctgggagacacagttggatttcg

SEQ ID NO: 299958 - DNA, 25 bp, probe
ttctgggagacacagttggatttcg

SEQ ID NO: 299959 - DNA, 25 bp, probe
ttcgaggacaacgactttgtgttcg

SEQ ID NO: 299960 - DNA, 25 bp, probe
ttctgcatggtctaaatctttgtgt

SEQ ID NO: 299961 - DNA, 25 bp, probe
ttctgtatgatgttactttatgtga

SEQ ID NO: 299962 - DNA, 25 bp, probe
ttctgcctgtgatcatttctttatg

SEQ ID NO: 299963 - DNA, 25 bp, probe
ttctctcatagaacattgatctgtt

SEQ ID NO: 299964 - DNA, 25 bp, probe
ttctctcatcaaatctatccatttt

SEQ ID NO: 299965 - DNA, 25 bp, probe
ttctgctatcaagtcatcctttatg

SEQ ID NO: 299966 - DNA, 25 bp, probe
ttccatgtcagagtcacctgatgtc

SEQ ID NO: 299967 - DNA, 25 bp, probe
ttctctgtcagcgaacgtggcattt

SEQ ID NO: 299968 - DNA, 25 bp, probe
ttctctgcagaggaagtagccttct

SEQ ID NO: 299969 - DNA, 25 bp, probe
ttctctgcagatacacttcagtttt

SEQ ID NO: 299970 - DNA, 25 bp, probe
ttctccagagtacccagctattaat

SEQ ID NO: 299971 - DNA, 25 bp, probe
ttctgcacaaaaccagcaattgtaa

SEQ ID NO: 299972 - DNA, 25 bp, probe
ttcccacaatcacccaacatgtaaa

SEQ ID NO: 299973 - DNA, 25 bp, probe
ttccccaagtgcggggagtacaagg

SEQ ID NO: 299974 - DNA, 25 bp, probe
ttccccaagagcggcggattaaggc

SEQ ID NO: 299975 - DNA, 25 bp, probe
ttcggcccaacctcagagtgaaggc

SEQ ID NO: 299976 - DNA, 25 bp, probe
ttgcccccaacctctgagggcaaga

SEQ ID NO: 299977 - DNA, 25 bp, probe
ttcccaccgactttctagaggaaat

SEQ ID NO: 299978 - DNA, 25 bp, probe
ttcccacctgtcaacctgaattaaa

SEQ ID NO: 299979 - DNA, 25 bp, probe
ttctctccctgtgacacagcttgta

SEQ ID NO: 299980 - DNA, 25 bp, probe
ttctgcaggactttaaagctttgaa

SEQ ID NO: 299981 - DNA, 25 bp, probe
ttctggctgattttagaactctaag

SEQ ID NO: 299982 - DNA, 25 bp, probe
ttctgctcttctgtacatttctaga

SEQ ID NO: 299983 - DNA, 25 bp, probe
ttctgctcttctgtacatttctaga

SEQ ID NO: 299984 - DNA, 25 bp, probe
ttctctgtattgtctattatttaga

SEQ ID NO: 299985 - DNA, 25 bp, probe
ttctttgcagtggcttaatgtttga

SEQ ID NO: 299986 - DNA, 25 bp, probe
ttgttgtggcgagcctcatgttaca

SEQ ID NO: 299987 - DNA, 25 bp, probe
ttgggggaggactcagttcacaaaa

SEQ ID NO: 299988 - DNA, 25 bp, probe
ttcggggtgaagcaagttcactaca

SEQ ID NO: 299989 - DNA, 25 bp, probe
ttctgtcggaaatgaaattcacaca

SEQ ID NO: 299990 - DNA, 25 bp, probe
ttcgtcgggtatgtaaatctcttag

SEQ ID NO: 299991 - DNA, 25 bp, probe
ttcgtcgggtatgtaaatctcttag

SEQ ID NO: 299992 - DNA, 25 bp, probe
ttcctcccagttctacaagcatatt

SEQ ID NO: 299993 - DNA, 25 bp, probe
ttcccaaactctcatcaacatctga

SEQ ID NO: 299994 - DNA, 25 bp, probe
ttctacaaactgattcaaaatggat

SEQ ID NO: 299995 - DNA, 25 bp, probe
ttctcaaaccagaggctaagatgaa

SEQ ID NO: 299996 - DNA, 25 bp, probe
ttctcaggcccagatcctatgaaaa

SEQ ID NO: 299997 - DNA, 25 bp, probe
ttctgcaggcccataacgggcaagg

SEQ ID NO: 299998 - DNA, 25 bp, probe
ttctgattcctcatcgactgtggac

SEQ ID NO: 299999 - DNA, 25 bp, probe
ttctgttccgtttactctgtttaca

SEQ ID NO: 300000 - DNA, 25 bp, probe
ttctgtcaccacttaaattatttaa

SEQ ID NO: 300001 - DNA, 25 bp, probe
ttctcttccatcaagaaaactttac

SEQ ID NO: 300002 - DNA, 25 bp, probe
ttctcctctttaataaaccttacat

SEQ ID NO: 300003 - DNA, 25 bp, probe
ttctacctttgtaaaacagcctata

SEQ ID NO: 300004 - DNA, 25 bp, probe
ttctagcacattactaaaagagcct

SEQ ID NO: 300005 - DNA, 25 bp, probe
ttctcagacatgtcttcttcaagag

SEQ ID NO: 300006 - DNA, 25 bp, probe
ttctccactgtccttcacaggaaat

SEQ ID NO: 300007 - DNA, 25 bp, probe
ttctcttcgttcacagatggaagaa

SEQ ID NO: 300008 - DNA, 25 bp, probe
ttctcttcgttccagataccaaata

SEQ ID NO: 300009 - DNA, 25 bp, probe
ttctcttcgttccagataccaaata

SEQ ID NO: 300010 - DNA, 25 bp, probe
ttctcttcgtcatgatcaacaaata

SEQ ID NO: 300011 - DNA, 25 bp, probe
ttctgttctgtcatgtgccacaaaa

SEQ ID NO: 300012 - DNA, 25 bp, probe
ttctgcatttgtactgatgtcagca

SEQ ID NO: 300013 - DNA, 25 bp, probe
ttccatgcagtgtcttgctggcaga

SEQ ID NO: 300014 - DNA, 25 bp, probe
ttctataatgccatcatgcagcaat

SEQ ID NO: 300015 - DNA, 25 bp, probe
ttctataaacaggcatgcactcata

SEQ ID NO: 300016 - DNA, 25 bp, probe
ttctgtacttcagtatgtgtcaact

SEQ ID NO: 300017 - DNA, 25 bp, probe
ttctgccacttcccaggtaagcagg

SEQ ID NO: 300018 - DNA, 25 bp, probe
ttctgccacttcccaggtaagcagg

SEQ ID NO: 300019 - DNA, 25 bp, probe
ttccctcatttccaacataggagga

SEQ ID NO: 300020 - DNA, 25 bp, probe
ttctgcctctgtagctcaagggggg

SEQ ID NO: 300021 - DNA, 25 bp, probe
ttcccattgtttacagtgaaggtgt

SEQ ID NO: 300022 - DNA, 25 bp, probe
ttccagctcttcaccgaaatgttgt

SEQ ID NO: 300023 - DNA, 25 bp, probe
ttctatgtgcttttatcagaaagtt

SEQ ID NO: 300024 - DNA, 25 bp, probe
ttcgatgcatttttatagaaacact

SEQ ID NO: 300025 - DNA, 25 bp, probe
ttctgcttgtgctgctattggaaca

SEQ ID NO: 300026 - DNA, 25 bp, probe
ttctcttgtgtacatgcttgtgaat

SEQ ID NO: 300027 - DNA, 25 bp, probe
ttctctggtggtttgtcttgacatt

SEQ ID NO: 300028 - DNA, 25 bp, probe
ttctctggtggtttgtcttgacatt

SEQ ID NO: 300029 - DNA, 25 bp, probe
ttctctgcctggcaacatcttactt

SEQ ID NO: 300030 - DNA, 25 bp, probe
ttctcttgctgtaacacttgacctt

SEQ ID NO: 300031 - DNA, 25 bp, probe
ttctaatgtatttctcttacctgct

SEQ ID NO: 300032 - DNA, 25 bp, probe
ttctacttctggtcatgcttacact

SEQ ID NO: 300033 - DNA, 25 bp, probe
ttctacgtgctcaacatcgtcaacg

SEQ ID NO: 300034 - DNA, 25 bp, probe
ttctacgtgctcaacatcgtcaacg

SEQ ID NO: 300035 - DNA, 25 bp, probe
ttctacaggatcaaccgagcccagg

SEQ ID NO: 300036 - DNA, 25 bp, probe
ttcgaaggcatcaaacaccccaatc

SEQ ID NO: 300037 - DNA, 25 bp, probe
ttcggagtgatttaccactgcacag

SEQ ID NO: 300038 - DNA, 25 bp, probe
ttcggagacatctgtctggcgatca

SEQ ID NO: 300039 - DNA, 25 bp, probe
ttctgaagacagtgcgcacggccac

SEQ ID NO: 300040 - DNA, 25 bp, probe
ttctgaagacagtgcgcacggccac

SEQ ID NO: 300041 - DNA, 25 bp, probe
ttctgtacgagatgctcattggcca

SEQ ID NO: 300042 - DNA, 25 bp, probe
ttctcatcatctctgttatacacct

SEQ ID NO: 300043 - DNA, 25 bp, probe
ttctcagttctacttatgacacctc

SEQ ID NO: 300044 - DNA, 25 bp, probe
ttctcagttctacttatgacacctc

SEQ ID NO: 300045 - DNA, 25 bp, probe
ttctgcaggttcatctcagacccac

SEQ ID NO: 300046 - DNA, 25 bp, probe
ttctgcaggttcatctcagacccac

SEQ ID NO: 300047 - DNA, 25 bp, probe
ttctcagtattcattcacttccagg

SEQ ID NO: 300048 - DNA, 25 bp, probe
ttctactttcgcaatcacttctgca

SEQ ID NO: 300049 - DNA, 25 bp, probe
ttctcagcttctgcgatcagattat

SEQ ID NO: 300050 - DNA, 25 bp, probe
ttctcagtatgcatcactagataat

SEQ ID NO: 300051 - DNA, 25 bp, probe
ttcgagtgactttctagattttgtt

SEQ ID NO: 300052 - DNA, 25 bp, probe
ttgggatacttctaatttggtggtg

SEQ ID NO: 300053 - DNA, 25 bp, probe
ttgagtatagtagagctttggggct

SEQ ID NO: 300054 - DNA, 25 bp, probe
ttgacctaatcagagtcatcgggcg

SEQ ID NO: 300055 - DNA, 25 bp, probe
ttctcctagacagggctgagtgggc

SEQ ID NO: 300056 - DNA, 25 bp, probe
ttctccgtgaacctgctgaagaggc

SEQ ID NO: 300057 - DNA, 25 bp, probe
ttctctaacaacctgtgaatatagg

SEQ ID NO: 300058 - DNA, 25 bp, probe
ttgctttaccaagtgtacagaaatg

SEQ ID NO: 300059 - DNA, 25 bp, probe
ttgagctctcccaggtgactgatga

SEQ ID NO: 300060 - DNA, 25 bp, probe
ttgagctctcccaggtgactgatga

SEQ ID NO: 300061 - DNA, 25 bp, probe
ttctgcttgtccaaggatgatctta

SEQ ID NO: 300062 - DNA, 25 bp, probe
ttctgcttgtccaaggatgatctta

SEQ ID NO: 300063 - DNA, 25 bp, probe
ttctgcttgacctgagagctctgtc

SEQ ID NO: 300064 - DNA, 25 bp, probe
ttctgttgcaccttgtagtggattc

SEQ ID NO: 300065 - DNA, 25 bp, probe
ttctcttctctgttgtaggttttgt

SEQ ID NO: 300066 - DNA, 25 bp, probe
ttcgtatatctgttctcggtactat

SEQ ID NO: 300067 - DNA, 25 bp, probe
ttcctgttcatgtacttggtcacgg

SEQ ID NO: 300068 - DNA, 25 bp, probe
ttcgtgggaacagcgcagtacgttt

SEQ ID NO: 300069 - DNA, 25 bp, probe
ttcctcggaagctccatggaatgtt

SEQ ID NO: 300070 - DNA, 25 bp, probe
ttgacgacgaaaacacagcccagtt

SEQ ID NO: 300071 - DNA, 25 bp, probe
ttgactatctaccaccaatacgttt

SEQ ID NO: 300072 - DNA, 25 bp, probe
ttgcacttgtggcaacagataagtt

SEQ ID NO: 300073 - DNA, 25 bp, probe
ttctctggggcctcaacagaactaa

SEQ ID NO: 300074 - DNA, 25 bp, probe
ttctctgtggctgcaacggcatgaa

SEQ ID NO: 300075 - DNA, 25 bp, probe
ttctctcgccagtcagacgtctgga

SEQ ID NO: 300076 - DNA, 25 bp, probe
ttctctgcctagtccacagattagg

SEQ ID NO: 300077 - DNA, 25 bp, probe
ttccttgcatgagccacagttcagg

SEQ ID NO: 300078 - DNA, 25 bp, probe
ttctcagattatgccaacttcaagt

SEQ ID NO: 300079 - DNA, 25 bp, probe
ttcggcatgtacgactacttcacac

SEQ ID NO: 300080 - DNA, 25 bp, probe
ttcggcatgtacgactacttcacac

SEQ ID NO: 300081 - DNA, 25 bp, probe
ttctgtggtactcctaattacattg

SEQ ID NO: 300082 - DNA, 25 bp, probe
ttgtgggtagttaagagtggggtca

SEQ ID NO: 300083 - DNA, 25 bp, probe
ttggggtagctattcaattagggga

SEQ ID NO: 300084 - DNA, 25 bp, probe
ttgggagttgatgaccttcggggca

SEQ ID NO: 300085 - DNA, 25 bp, probe
ttgggagttgatgaccttcggggca

SEQ ID NO: 300086 - DNA, 25 bp, probe
ttgagccagggaaacctccagggga

SEQ ID NO: 300087 - DNA, 25 bp, probe
ttgatggcgaggcggaggacgggga

SEQ ID NO: 300088 - DNA, 25 bp, probe
ttcgagcgcgaccaggtggacgcga

SEQ ID NO: 300089 - DNA, 25 bp, probe
ttcgtcgccaagctgctggagggca

SEQ ID NO: 300090 - DNA, 25 bp, probe
ttcgtcgccaagctgctggagggca

SEQ ID NO: 300091 - DNA, 25 bp, probe
ttcggggcagagccctatgcagggc

SEQ ID NO: 300092 - DNA, 25 bp, probe
ttccgggagcagtttaaggctgcct

SEQ ID NO: 300093 - DNA, 25 bp, probe
ttccgcaaggcgctcaagagcctgc

SEQ ID NO: 300094 - DNA, 25 bp, probe
ttccgacagcgacgacaaatgccaa

SEQ ID NO: 300095 - DNA, 25 bp, probe
ttccaggagcgagatccctccaaaa

SEQ ID NO: 300096 - DNA, 25 bp, probe
ttccggaacacgacttcaactcgaa

SEQ ID NO: 300097 - DNA, 25 bp, probe
ttcgggaacttcatctccttggaca

SEQ ID NO: 300098 - DNA, 25 bp, probe
ttcgggaacttcatctccttggaca

SEQ ID NO: 300099 - DNA, 25 bp, probe
ttcccagatacttcccattttggaa

SEQ ID NO: 300100 - DNA, 25 bp, probe
ttccaggttatatctcatctttgag

SEQ ID NO: 300101 - DNA, 25 bp, probe
ttccaggttatatctcatctttgag

SEQ ID NO: 300102 - DNA, 25 bp, probe
ttcctgtggtttttcacccaagaag

SEQ ID NO: 300103 - DNA, 25 bp, probe
ttcgtgttttcttctaacctggcaa

SEQ ID NO: 300104 - DNA, 25 bp, probe
ttctggtttggtgtcaacagctcac

SEQ ID NO: 300105 - DNA, 25 bp, probe
ttctgattttttcacatacgctcat

SEQ ID NO: 300106 - DNA, 25 bp, probe
ttctgaattcttggatattacttat

SEQ ID NO: 300107 - DNA, 25 bp, probe
ttctgaatctttgtatttgcttttg

SEQ ID NO: 300108 - DNA, 25 bp, probe
ttctgatgtcttattttgtcatatt

SEQ ID NO: 300109 - DNA, 25 bp, probe
ttccagcttttcatgtttcaacttt

SEQ ID NO: 300110 - DNA, 25 bp, probe
ttctcagctctgattgagtttgcca

SEQ ID NO: 300111 - DNA, 25 bp, probe
ttctcgcctctattgagctgctggc

SEQ ID NO: 300112 - DNA, 25 bp, probe
ttctcgcctctattgagctgctggc

SEQ ID NO: 300113 - DNA, 25 bp, probe
ttctcacctctattaagctgctgac

SEQ ID NO: 300114 - DNA, 25 bp, probe
ttcgctcttcgattatgactgctgc

SEQ ID NO: 300115 - DNA, 25 bp, probe
ttcgctcttcgattatgactgctgc

SEQ ID NO: 300116 - DNA, 25 bp, probe
ttctggctttaaatcacagtgcaca

SEQ ID NO: 300117 - DNA, 25 bp, probe
ttcgagcctcaaaatttgctgcaca

SEQ ID NO: 300118 - DNA, 25 bp, probe
ttcgaacgcactgatttcgaccagg

SEQ ID NO: 300119 - DNA, 25 bp, probe
ttctggaccacttactggtgaaagc

SEQ ID NO: 300120 - DNA, 25 bp, probe
ttctggacaaccgactggggcggga

SEQ ID NO: 300121 - DNA, 25 bp, probe
ttctggacaaccgactggggcggga

SEQ ID NO: 300122 - DNA, 25 bp, probe
ttctgaacatcggatactggggcgg

SEQ ID NO: 300123 - DNA, 25 bp, probe
ttcggactcggacctagaggaggcc

SEQ ID NO: 300124 - DNA, 25 bp, probe
ttccagtctggatcctagaaaggtt

SEQ ID NO: 300125 - DNA, 25 bp, probe
ttcgcagctcggtggcggagcaagg

SEQ ID NO: 300126 - DNA, 25 bp, probe
ttctgatggcccttgggagacagat

SEQ ID NO: 300127 - DNA, 25 bp, probe
ttctgtgcagccactgttaagccat

SEQ ID NO: 300128 - DNA, 25 bp, probe
ttctctgcaccgtcttgtagcatgg

SEQ ID NO: 300129 - DNA, 25 bp, probe
ttctgtgcacgcatttgctgtgcga

SEQ ID NO: 300130 - DNA, 25 bp, probe
ttctgtgcacgcatttgctgtgcga

SEQ ID NO: 300131 - DNA, 25 bp, probe
ttctggcagtgcaggcattactaaa

SEQ ID NO: 300132 - DNA, 25 bp, probe
ttctgtactcgggctctgactacag

SEQ ID NO: 300133 - DNA, 25 bp, probe
ttctctacgccttcttgaataagtc

SEQ ID NO: 300134 - DNA, 25 bp, probe
ttctctaggccttcaggactctaga

SEQ ID NO: 300135 - DNA, 25 bp, probe
ttctcttggctttagatgacattta

SEQ ID NO: 300136 - DNA, 25 bp, probe
ttctgtgtggctgacagtctcagtt

SEQ ID NO: 300137 - DNA, 25 bp, probe
ttctcatgctgcgcaaagtgctcga

SEQ ID NO: 300138 - DNA, 25 bp, probe
ttctcagtgccccagaggtctagga

SEQ ID NO: 300139 - DNA, 25 bp, probe
ttctccatggccacaggttgaagca

SEQ ID NO: 300140 - DNA, 25 bp, probe
ttctcacagaccctaggtatccaca

SEQ ID NO: 300141 - DNA, 25 bp, probe
ttctcacagaccctaggtatccaca

SEQ ID NO: 300142 - DNA, 25 bp, probe
ttctctccacccaaaatatcacagc

SEQ ID NO: 300143 - DNA, 25 bp, probe
ttccgtcatccaaaatataacactt

SEQ ID NO: 300144 - DNA, 25 bp, probe
ttccgtcatccaaaatataacactt

SEQ ID NO: 300145 - DNA, 25 bp, probe
ttccccaccaaatattcacttttct

SEQ ID NO: 300146 - DNA, 25 bp, probe
ttccccaccaaatattcacttttct

SEQ ID NO: 300147 - DNA, 25 bp, probe
ttcccctgtgcatggtattaccttt

SEQ ID NO: 300148 - DNA, 25 bp, probe
ttcccctgatcctgtttcatagatt

SEQ ID NO: 300149 - DNA, 25 bp, probe
ttccgaagtttagtttctcaggctc

SEQ ID NO: 300150 - DNA, 25 bp, probe
ttctcccggttcattttatgcgtgc

SEQ ID NO: 300151 - DNA, 25 bp, probe
ttcccacggtttatgtgtgtgcctc

SEQ ID NO: 300152 - DNA, 25 bp, probe
ttcccacggtttatgtgtgtgcctc

SEQ ID NO: 300153 - DNA, 25 bp, probe
ttccccagggttctgtattgcagct

SEQ ID NO: 300154 - DNA, 25 bp, probe
ttccccagggggtagtattgatgat

SEQ ID NO: 300155 - DNA, 25 bp, probe
ttccccagggggtagtattgatgat

SEQ ID NO: 300156 - DNA, 25 bp, probe
ttcgaccagaggccaagaattttaa

SEQ ID NO: 300157 - DNA, 25 bp, probe
ttcggtgagaccaaccaatgtatta

SEQ ID NO: 300158 - DNA, 25 bp, probe
ttctggtaccacaggcagtttgaag

SEQ ID NO: 300159 - DNA, 25 bp, probe
ttcggttgctctgagaagttggaag

SEQ ID NO: 300160 - DNA, 25 bp, probe
ttcggcctctctaagaagatttaca

SEQ ID NO: 300161 - DNA, 25 bp, probe
ttgggcactcccaataatgaagtgt

SEQ ID NO: 300162 - DNA, 25 bp, probe
ttggggtggccaagggcaaggtcca

SEQ ID NO: 300163 - DNA, 25 bp, probe
ttgcgttgtggaattgggaagggca

SEQ ID NO: 300164 - DNA, 25 bp, probe
ttgtctctgccgctggggaaggtaa

SEQ ID NO: 300165 - DNA, 25 bp, probe
ttgtctctgccgctggggaaggtaa

SEQ ID NO: 300166 - DNA, 25 bp, probe
ttctctctgcgcctgatggaggaaa

SEQ ID NO: 300167 - DNA, 25 bp, probe
ttctctctcctttacgagacgaaaa

SEQ ID NO: 300168 - DNA, 25 bp, probe
ttctctcacctttaaatggcacaac

SEQ ID NO: 300169 - DNA, 25 bp, probe
ttctctcctcttttaacaacagtca

SEQ ID NO: 300170 - DNA, 25 bp, probe
ttctgtcctacttgtacatagtcag

SEQ ID NO: 300171 - DNA, 25 bp, probe
ttctgtcctacttgtacatagtcag

SEQ ID NO: 300172 - DNA, 25 bp, probe
ttctgtgcccaccgtgagggctgag

SEQ ID NO: 300173 - DNA, 25 bp, probe
ttctgtgtctgcaaggatgagtggg

SEQ ID NO: 300174 - DNA, 25 bp, probe
ttctgcgtccacggagatgggcacg

SEQ ID NO: 300175 - DNA, 25 bp, probe
ttctgcgtgggtggtgatgggggtt

SEQ ID NO: 300176 - DNA, 25 bp, probe
ttctgtggagggcctggggttgtgt

SEQ ID NO: 300177 - DNA, 25 bp, probe
ttctggaaatggctgtaggtggtgt

SEQ ID NO: 300178 - DNA, 25 bp, probe
ttctgtacactgaccttaggcatgg

SEQ ID NO: 300179 - DNA, 25 bp, probe
ttctgcttcaaaccctcaagagggg

SEQ ID NO: 300180 - DNA, 25 bp, probe
ttctcgacaaggatccagcgacgcg

SEQ ID NO: 300181 - DNA, 25 bp, probe
ttctcgacaaggatccagcgacgcg

SEQ ID NO: 300182 - DNA, 25 bp, probe
ttctgtgcacaaagtgctcccttcc

SEQ ID NO: 300183 - DNA, 25 bp, probe
ttctgaagcagaagctccaccacca

SEQ ID NO: 300184 - DNA, 25 bp, probe
ttctgaagcagaagctccaccacca

SEQ ID NO: 300185 - DNA, 25 bp, probe
ttggagcactatacccacaacactg

SEQ ID NO: 300186 - DNA, 25 bp, probe
ttggaggctgcatcgctcaaatctt

SEQ ID NO: 300187 - DNA, 25 bp, probe
ttctgtggtgcatctgagccagtct

SEQ ID NO: 300188 - DNA, 25 bp, probe
ttctggcctctggctagtcagtttt

SEQ ID NO: 300189 - DNA, 25 bp, probe
ttctggcctctggctagtcagtttt

SEQ ID NO: 300190 - DNA, 25 bp, probe
ttctgccttgctgaagacagctttt

SEQ ID NO: 300191 - DNA, 25 bp, probe
ttctcactagataaaaccattggcc

SEQ ID NO: 300192 - DNA, 25 bp, probe
ttccattaaggccaactgcattgac

SEQ ID NO: 300193 - DNA, 25 bp, probe
ttcctttaggaatgctgtgtgtctg

SEQ ID NO: 300194 - DNA, 25 bp, probe
ttccttgaagactggagggttgaga

SEQ ID NO: 300195 - DNA, 25 bp, probe
ttcccagaaccttgatggggtgaga

SEQ ID NO: 300196 - DNA, 25 bp, probe
ttctccatacctctctgtgggaaga

SEQ ID NO: 300197 - DNA, 25 bp, probe
ttctcctacactcagctgctgaggg

SEQ ID NO: 300198 - DNA, 25 bp, probe
ttctgctctatcttactgctatggg

SEQ ID NO: 300199 - DNA, 25 bp, probe
ttctgcacacagtatatcatctatg

SEQ ID NO: 300200 - DNA, 25 bp, probe
ttctcgcacatgaactgcatccttc

SEQ ID NO: 300201 - DNA, 25 bp, probe
ttctccacaataggctctcaacaaa

SEQ ID NO: 300202 - DNA, 25 bp, probe
ttcccaccatactgctcataataac

SEQ ID NO: 300203 - DNA, 25 bp, probe
ttccccaatgaatgtcaccatcaga

SEQ ID NO: 300204 - DNA, 25 bp, probe
ttctccacaatgaaaagaccatcca

SEQ ID NO: 300205 - DNA, 25 bp, probe
ttctccacaatgaaaagaccatcca

SEQ ID NO: 300206 - DNA, 25 bp, probe
ttctcctccattcagaagttccatc

SEQ ID NO: 300207 - DNA, 25 bp, probe
ttctgcacatccggatagaagattc

SEQ ID NO: 300208 - DNA, 25 bp, probe
ttcgcagcaccaggctagtaatact

SEQ ID NO: 300209 - DNA, 25 bp, probe
ttctgacacccacatcaacgagatg

SEQ ID NO: 300210 - DNA, 25 bp, probe
ttctgacacccacatcaacgagatg

SEQ ID NO: 300211 - DNA, 25 bp, probe
ttctgagctccataagaactgtgct

SEQ ID NO: 300212 - DNA, 25 bp, probe
ttctggcacagtgagtgaacagctc

SEQ ID NO: 300213 - DNA, 25 bp, probe
ttctggatcggctactgcaacagct

SEQ ID NO: 300214 - DNA, 25 bp, probe
ttctggatccactctggacactcaa

SEQ ID NO: 300215 - DNA, 25 bp, probe
ttctggatccactctggacactcaa

SEQ ID NO: 300216 - DNA, 25 bp, probe
ttctggatccactctggacactcaa

SEQ ID NO: 300217 - DNA, 25 bp, probe
ttcggacgccaggtggacctgtgca

SEQ ID NO: 300218 - DNA, 25 bp, probe
ttctgccggccacataacatttgca

SEQ ID NO: 300219 - DNA, 25 bp, probe
ttctcggagccatttgtacatttca

SEQ ID NO: 300220 - DNA, 25 bp, probe
ttctctgggcaaattgtcgccttta

SEQ ID NO: 300221 - DNA, 25 bp, probe
ttctctgcttaaagaatgcccttta

SEQ ID NO: 300222 - DNA, 25 bp, probe
ttctctctctaaggcaggtctttta

SEQ ID NO: 300223 - DNA, 25 bp, probe
ttctcttttatggcagcgccatctt

SEQ ID NO: 300224 - DNA, 25 bp, probe
ttctcatctttcaaagcctgttata

SEQ ID NO: 300225 - DNA, 25 bp, probe
ttctcttcctcataagcttctaaat

SEQ ID NO: 300226 - DNA, 25 bp, probe
ttctcttctccattgaagttcaagt

SEQ ID NO: 300227 - DNA, 25 bp, probe
ttctcttctgctccttatgttagca

SEQ ID NO: 300228 - DNA, 25 bp, probe
ttcgttccagacatgagcttgagca

SEQ ID NO: 300229 - DNA, 25 bp, probe
ttctgctatctctacattccattga

SEQ ID NO: 300230 - DNA, 25 bp, probe
ttctggcttctatttctatgtgagt

SEQ ID NO: 300231 - DNA, 25 bp, probe
ttctggtcatcttgtggcttagttg

SEQ ID NO: 300232 - DNA, 25 bp, probe
ttctgtgacatctctccagtactta

SEQ ID NO: 300233 - DNA, 25 bp, probe
ttctgtgacatctctccagtactta

SEQ ID NO: 300234 - DNA, 25 bp, probe
ttctgcagacacttcccaagtgtct

SEQ ID NO: 300235 - DNA, 25 bp, probe
ttctgagcatacctggaaaatgctt

SEQ ID NO: 300236 - DNA, 25 bp, probe
ttgcttctacctggcaaaacgtcct

SEQ ID NO: 300237 - DNA, 25 bp, probe
ttctcttccagctgctaaaaggcct

SEQ ID NO: 300238 - DNA, 25 bp, probe
ttctctccactctgcattaaagtgc

SEQ ID NO: 300239 - DNA, 25 bp, probe
ttctctccactctgcattaaagtgc

SEQ ID NO: 300240 - DNA, 25 bp, probe
ttctctcctgcttctatgtaattgg

SEQ ID NO: 300241 - DNA, 25 bp, probe
ttctcatcttcataataccagtgtg

SEQ ID NO: 300242 - DNA, 25 bp, probe
ttctccttggaaaaacgctgatgca

SEQ ID NO: 300243 - DNA, 25 bp, probe
ttctccttaattaactgggatgatc

SEQ ID NO: 300244 - DNA, 25 bp, probe
ttgcttttccctgacgagagtatct

SEQ ID NO: 300245 - DNA, 25 bp, probe
ttgctatttaccagaggaaggttga

SEQ ID NO: 300246 - DNA, 25 bp, probe
ttgctttttgcgttgggatgggttc

SEQ ID NO: 300247 - DNA, 25 bp, probe
ttctcttattcgtgttaggtgcccc

SEQ ID NO: 300248 - DNA, 25 bp, probe
ttctgtttgcccttttatggatgcc

SEQ ID NO: 300249 - DNA, 25 bp, probe
ttcgctctcgccgagtttgttagcc

SEQ ID NO: 300250 - DNA, 25 bp, probe
ttctcattcttaggtgcattttatc

SEQ ID NO: 300251 - DNA, 25 bp, probe
ttctctgttgtaggttttgtacagt

SEQ ID NO: 300252 - DNA, 25 bp, probe
ttctcttctgtcttgtttggtaata

SEQ ID NO: 300253 - DNA, 25 bp, probe
ttctccctgtattctattttactac

SEQ ID NO: 300254 - DNA, 25 bp, probe
ttctccctgtattctattttactac

SEQ ID NO: 300255 - DNA, 25 bp, probe
ttctctttgtatttatggattcctt

SEQ ID NO: 300256 - DNA, 25 bp, probe
ttctgtttttgcttcttatttctct

SEQ ID NO: 300257 - DNA, 25 bp, probe
ttctgttttctggtgttatatcttt

SEQ ID NO: 300258 - DNA, 25 bp, probe
ttctggattccagcttgtcttttta

SEQ ID NO: 300259 - DNA, 25 bp, probe
ttctctttcacattcttgtattttt

SEQ ID NO: 300260 - DNA, 25 bp, probe
ttctctttgaataatttctcctgtt

SEQ ID NO: 300261 - DNA, 25 bp, probe
ttcggtataataatcgtgagcgttt

SEQ ID NO: 300262 - DNA, 25 bp, probe
ttctggaaatcattatcgttgcagc

SEQ ID NO: 300263 - DNA, 25 bp, probe
ttcgcaaagaactactgggcatgtg

SEQ ID NO: 300264 - DNA, 25 bp, probe
ttctgcaataaagtcacgagcgttc

SEQ ID NO: 300265 - DNA, 25 bp, probe
ttctgcaatagatgacactgatggt

SEQ ID NO: 300266 - DNA, 25 bp, probe
ttctggtcatgcttacactgataca

SEQ ID NO: 300267 - DNA, 25 bp, probe
ttccccagcttattgctgcatcact

SEQ ID NO: 300268 - DNA, 25 bp, probe
ttctgccgagccatagacatcatct

SEQ ID NO: 300269 - DNA, 25 bp, probe
ttctgcacgagcaagtttctcatta

SEQ ID NO: 300270 - DNA, 25 bp, probe
ttctgaatatgcaactgtccactta

SEQ ID NO: 300271 - DNA, 25 bp, probe
ttcgcgtggcattttcacattattt

SEQ ID NO: 300272 - DNA, 25 bp, probe
ttctgcaatcagtttggcaattttt

SEQ ID NO: 300273 - DNA, 25 bp, probe
ttcgaatcagacctgccaaggtgat

SEQ ID NO: 300274 - DNA, 25 bp, probe
ttctcttcagtgggccacagagcta

SEQ ID NO: 300275 - DNA, 25 bp, probe
ttctctgccagtgacagacaggctc

SEQ ID NO: 300276 - DNA, 25 bp, probe
ttctctgccgtccaggagagtgcat

SEQ ID NO: 300277 - DNA, 25 bp, probe
ttctccctgtgccagaagatcgagc

SEQ ID NO: 300278 - DNA, 25 bp, probe
ttctgcagggctgaaagcacaggtg

SEQ ID NO: 300279 - DNA, 25 bp, probe
ttctctggatctggcaatagactgg

SEQ ID NO: 300280 - DNA, 25 bp, probe
ttctctggcagccggtaacagctga

SEQ ID NO: 300281 - DNA, 25 bp, probe
ttgattgactccgttattccgaaag

SEQ ID NO: 300282 - DNA, 25 bp, probe
ttgattgactgcccattcaccaaaa

SEQ ID NO: 300283 - DNA, 25 bp, probe
ttgcattacattcactcatcggaaa

SEQ ID NO: 300284 - DNA, 25 bp, probe
ttgcttacttcaactcagcctgcaa

SEQ ID NO: 300285 - DNA, 25 bp, probe
ttgttcatcatgacaacctgcctca

SEQ ID NO: 300286 - DNA, 25 bp, probe
ttgcgtcaatagctcagtcctgcag

SEQ ID NO: 300287 - DNA, 25 bp, probe
ttgcgtcaatagctcagtcctgcag

SEQ ID NO: 300288 - DNA, 25 bp, probe
ttgctggcaatgtttcccaatgcag

SEQ ID NO: 300289 - DNA, 25 bp, probe
ttctgagcaaggttctatgcaatca

SEQ ID NO: 300290 - DNA, 25 bp, probe
ttctctgcaacttgttgagcaacat

SEQ ID NO: 300291 - DNA, 25 bp, probe
ttccatgcaacgtcctgaggacagt

SEQ ID NO: 300292 - DNA, 25 bp, probe
ttccgaatcatgcccggggcaggta

SEQ ID NO: 300293 - DNA, 25 bp, probe
ttccaaaaggacctggtagtgctta

SEQ ID NO: 300294 - DNA, 25 bp, probe
ttcgaaatcaggtggttagctcaac

SEQ ID NO: 300295 - DNA, 25 bp, probe
ttcgaaatcaggtggttagctcaac

SEQ ID NO: 300296 - DNA, 25 bp, probe
ttcgtcaaagactgccttactaaag

SEQ ID NO: 300297 - DNA, 25 bp, probe
ttcgtcaaagactgccttactaaag

SEQ ID NO: 300298 - DNA, 25 bp, probe
ttcgtcaaagactgccttactaaag

SEQ ID NO: 300299 - DNA, 25 bp, probe
ttcgtggaggcctgcctcaacaaag

SEQ ID NO: 300300 - DNA, 25 bp, probe
ttgtgtggggcttccctaagcataa

SEQ ID NO: 300301 - DNA, 25 bp, probe
ttgcttggaggctactcccaagcct

SEQ ID NO: 300302 - DNA, 25 bp, probe
ttctgtggcagattgactcctacca

SEQ ID NO: 300303 - DNA, 25 bp, probe
ttctgtgggacacctgactacatcg

SEQ ID NO: 300304 - DNA, 25 bp, probe
ttctgtgggccccatgaaatcaacc

SEQ ID NO: 300305 - DNA, 25 bp, probe
ttctgtgtgtgcctcacgaaatggc

SEQ ID NO: 300306 - DNA, 25 bp, probe
ttctggggtcatcctgagaaggtca

SEQ ID NO: 300307 - DNA, 25 bp, probe
ttctggccgtcttctgtgtagggca

SEQ ID NO: 300308 - DNA, 25 bp, probe
ttcggcacggtgccgtacatggcgc

SEQ ID NO: 300309 - DNA, 25 bp, probe
ttcggcacggtgccgtacatggcgc

SEQ ID NO: 300310 - DNA, 25 bp, probe
ttctgtagggagcagtaagcagctg

SEQ ID NO: 300311 - DNA, 25 bp, probe
ttctggactggaccttagtactgta

SEQ ID NO: 300312 - DNA, 25 bp, probe
ttctgctactggcgttttgtgtgga

SEQ ID NO: 300313 - DNA, 25 bp, probe
ttctgtacagtcaggtctgctctgg

SEQ ID NO: 300314 - DNA, 25 bp, probe
ttctgttcagtaagaatcatgtctt

SEQ ID NO: 300315 - DNA, 25 bp, probe
ttctgcttccttggatgtcattgct

SEQ ID NO: 300316 - DNA, 25 bp, probe
ttctgcctcactttatgtcatctgc

SEQ ID NO: 300317 - DNA, 25 bp, probe
ttctgcctcagatcgatttgctgct

SEQ ID NO: 300318 - DNA, 25 bp, probe
ttctcccaagagctttgttggatga

SEQ ID NO: 300319 - DNA, 25 bp, probe
ttccctcagagagaatccagtggag

SEQ ID NO: 300320 - DNA, 25 bp, probe
ttccctcaataacaccaatgttttg

SEQ ID NO: 300321 - DNA, 25 bp, probe
ttccctcaataacaccaatgttttg

SEQ ID NO: 300322 - DNA, 25 bp, probe
ttccctgaaacacgaaacttgttat

SEQ ID NO: 300323 - DNA, 25 bp, probe
ttctctggaaacctaatcctccttt

SEQ ID NO: 300324 - DNA, 25 bp, probe
ttctctggaaacctaatcctccttt

SEQ ID NO: 300325 - DNA, 25 bp, probe
ttctctggagattcctgcaacctca

SEQ ID NO: 300326 - DNA, 25 bp, probe
ttctctgaggaagcgcaactccatg

SEQ ID NO: 300327 - DNA, 25 bp, probe
ttctctgaaaactaagacacaattg

SEQ ID NO: 300328 - DNA, 25 bp, probe
ttgcacttaaactcattccatatgc

SEQ ID NO: 300329 - DNA, 25 bp, probe
ttgccccagaaattcattccaaccc

SEQ ID NO: 300330 - DNA, 25 bp, probe
ttctccctgcagaaacatctccaga

SEQ ID NO: 300331 - DNA, 25 bp, probe
ttctccatgtggaaacatcgcaaga

SEQ ID NO: 300332 - DNA, 25 bp, probe
ttcgtgctggaggaacttgctgctg

SEQ ID NO: 300333 - DNA, 25 bp, probe
ttccggctgagcaacactgtgctgg

SEQ ID NO: 300334 - DNA, 25 bp, probe
ttcgcgctgacagccgtggctgagg

SEQ ID NO: 300335 - DNA, 25 bp, probe
ttctgcgcttcgtggtgtatgagga

SEQ ID NO: 300336 - DNA, 25 bp, probe
ttctgctgtttaaggtcttgggagg

SEQ ID NO: 300337 - DNA, 25 bp, probe
ttgctggtgttgagtgtcctgttgg

SEQ ID NO: 300338 - DNA, 25 bp, probe
ttctggatggtcagcggttgcgtgg

SEQ ID NO: 300339 - DNA, 25 bp, probe
ttctggctggctcaaaggtagtgag

SEQ ID NO: 300340 - DNA, 25 bp, probe
ttctggggatggtacagggtgtgac

SEQ ID NO: 300341 - DNA, 25 bp, probe
ttcggaggtcggtcaatggcactac

SEQ ID NO: 300342 - DNA, 25 bp, probe
ttcgtgggcctgtacagtgagacat

SEQ ID NO: 300343 - DNA, 25 bp, probe
ttcgtggaggtgcgcagtggactca

SEQ ID NO: 300344 - DNA, 25 bp, probe
ttctcgctgctgcgggagggacatc

SEQ ID NO: 300345 - DNA, 25 bp, probe
ttctcgctgctgcgggagggacatc

SEQ ID NO: 300346 - DNA, 25 bp, probe
ttctccagcggtgggaagtgatgca

SEQ ID NO: 300347 - DNA, 25 bp, probe
ttccctgcgtctcagacatgttgag

SEQ ID NO: 300348 - DNA, 25 bp, probe
ttcgcctgagttcttgcatcaagag

SEQ ID NO: 300349 - DNA, 25 bp, probe
ttcgcctggcttcactgaaccagat

SEQ ID NO: 300350 - DNA, 25 bp, probe
ttccctggtatcctcaaacctgaca

SEQ ID NO: 300351 - DNA, 25 bp, probe
ttcccttgttttcacagctatcaca

SEQ ID NO: 300352 - DNA, 25 bp, probe
ttcccttgttttcacagctatcaca

SEQ ID NO: 300353 - DNA, 25 bp, probe
ttcccaggctttcctgtagctactg

SEQ ID NO: 300354 - DNA, 25 bp, probe
ttctccagtgcagtctactttgctg

SEQ ID NO: 300355 - DNA, 25 bp, probe
ttctccattgaggacagttctgctc

SEQ ID NO: 300356 - DNA, 25 bp, probe
ttcccagaggcttctgtacagtcag

SEQ ID NO: 300357 - DNA, 25 bp, probe
ttctccatgggcagtgctaaggctt

SEQ ID NO: 300358 - DNA, 25 bp, probe
ttcccagctgtcagatgaacaggtt

SEQ ID NO: 300359 - DNA, 25 bp, probe
ttcccagctgtcagatgaacaggtt

SEQ ID NO: 300360 - DNA, 25 bp, probe
ttcccagctgtcagatgaacaggtt

SEQ ID NO: 300361 - DNA, 25 bp, probe
ttccactcttcggagttgcagttaa

SEQ ID NO: 300362 - DNA, 25 bp, probe
ttctcctgttccatttcagttcagt

SEQ ID NO: 300363 - DNA, 25 bp, probe
ttgcccttccacgttggcagaatca

SEQ ID NO: 300364 - DNA, 25 bp, probe
ttctcctggtgcggttgaagaagaa

SEQ ID NO: 300365 - DNA, 25 bp, probe
ttcccctgtgcatgtgcgaaggaaa

SEQ ID NO: 300366 - DNA, 25 bp, probe
ttcctactctgcaagtggacgagaa

SEQ ID NO: 300367 - DNA, 25 bp, probe
ttctctgttctttgggtcaggagca

SEQ ID NO: 300368 - DNA, 25 bp, probe
ttctctgttctttgggtcaggagca

SEQ ID NO: 300369 - DNA, 25 bp, probe
ttccgtatcttaagtgaggaggcat

SEQ ID NO: 300370 - DNA, 25 bp, probe
ttccgtatcttgatctgagtggcaa

SEQ ID NO: 300371 - DNA, 25 bp, probe
ttctcgttctttactgggtctaaag

SEQ ID NO: 300372 - DNA, 25 bp, probe
ttgactgtgtccattcgggttatta

SEQ ID NO: 300373 - DNA, 25 bp, probe
ttgaaatgtccctggtttctattga

SEQ ID NO: 300374 - DNA, 25 bp, probe
ttccaactcctctggtttctaaaag

SEQ ID NO: 300375 - DNA, 25 bp, probe
ttcccacctctctgaatagtgtgta

SEQ ID NO: 300376 - DNA, 25 bp, probe
ttccagcggtccacattagagttga

SEQ ID NO: 300377 - DNA, 25 bp, probe
ttcgcagtggtcctttctacttgga

SEQ ID NO: 300378 - DNA, 25 bp, probe
ttccgggacgagtttgatctggcca

SEQ ID NO: 300379 - DNA, 25 bp, probe
ttccaggcgaggctcctaatggcca

SEQ ID NO: 300380 - DNA, 25 bp, probe
ttccccaagtcggcactgagtggcc

SEQ ID NO: 300381 - DNA, 25 bp, probe
ttcccacaaatgccactcttgggcc

SEQ ID NO: 300382 - DNA, 25 bp, probe
ttccttaactgaggccgtggctgcc

SEQ ID NO: 300383 - DNA, 25 bp, probe
ttccttaactgcacgatattcagat

SEQ ID NO: 300384 - DNA, 25 bp, probe
ttcctaaaggagatgtaatcagtgt

SEQ ID NO: 300385 - DNA, 25 bp, probe
ttccccagaaacctgtaatcagtgt

SEQ ID NO: 300386 - DNA, 25 bp, probe
ttccccaggagagagtggtctggtg

SEQ ID NO: 300387 - DNA, 25 bp, probe
ttctcccaggagcaagaggagcgga

SEQ ID NO: 300388 - DNA, 25 bp, probe
ttctcccgagtgcagctcagtgaag

SEQ ID NO: 300389 - DNA, 25 bp, probe
ttccccagagcacagctcagcatca

SEQ ID NO: 300390 - DNA, 25 bp, probe
ttgccccctgactgatagcatttca

SEQ ID NO: 300391 - DNA, 25 bp, probe
ttcgttcctgaatacaatcttgagt

SEQ ID NO: 300392 - DNA, 25 bp, probe
ttctgtgcgccttaaacaattcttg

SEQ ID NO: 300393 - DNA, 25 bp, probe
ttctgtgcgcttacccagaattctt

SEQ ID NO: 300394 - DNA, 25 bp, probe
ttggtgacgtagaccgtttgcttct

SEQ ID NO: 300395 - DNA, 25 bp, probe
ttggagacaattgcctggttccctg

SEQ ID NO: 300396 - DNA, 25 bp, probe
ttccagaacagtgccttggtcatcc

SEQ ID NO: 300397 - DNA, 25 bp, probe
ttctgagaacattccctgatcctac

SEQ ID NO: 300398 - DNA, 25 bp, probe
ttgcatcaaactacctgctacaata

SEQ ID NO: 300399 - DNA, 25 bp, probe
ttccaaaccatcttgttcaacttcc

SEQ ID NO: 300400 - DNA, 25 bp, probe
ttccactacactatgatcctgacta

SEQ ID NO: 300401 - DNA, 25 bp, probe
ttccactacactatgatcctgacta

SEQ ID NO: 300402 - DNA, 25 bp, probe
ttcccccatctggtgatgcttgagt

SEQ ID NO: 300403 - DNA, 25 bp, probe
ttcccccatgtggtcgttagagaca

SEQ ID NO: 300404 - DNA, 25 bp, probe
ttcgggccatggggtgtgtagtaat

SEQ ID NO: 300405 - DNA, 25 bp, probe
ttctgtccctggggtgtgtgaattc

SEQ ID NO: 300406 - DNA, 25 bp, probe
ttctcgcccctgaagttgtgaacta

SEQ ID NO: 300407 - DNA, 25 bp, probe
ttccggagcctggaattgcgcaaca

SEQ ID NO: 300408 - DNA, 25 bp, probe
ttcctgacacctggaactgtgcacc

SEQ ID NO: 300409 - DNA, 25 bp, probe
ttcctaacttactctgtgttcaggt

SEQ ID NO: 300410 - DNA, 25 bp, probe
ttcctctttgtagttagcgttcagg

SEQ ID NO: 300411 - DNA, 25 bp, probe
ttccctttgtatatcagttacgggt

SEQ ID NO: 300412 - DNA, 25 bp, probe
ttccctggggctagccagttactgg

SEQ ID NO: 300413 - DNA, 25 bp, probe
ttccttggtgtctcacttcaactgt

SEQ ID NO: 300414 - DNA, 25 bp, probe
ttccttttggctaacttcttctggg

SEQ ID NO: 300415 - DNA, 25 bp, probe
ttccttcattgatttacatttttgg

SEQ ID NO: 300416 - DNA, 25 bp, probe
ttccttttgaaaacttgttcgcacg

SEQ ID NO: 300417 - DNA, 25 bp, probe
ttcctggggaagagttgtacgccca

SEQ ID NO: 300418 - DNA, 25 bp, probe
ttcctggggaagacgttcttgacgt

SEQ ID NO: 300419 - DNA, 25 bp, probe
ttccggaggccattgagttcattga

SEQ ID NO: 300420 - DNA, 25 bp, probe
ttcccagacccagggtactctaata

SEQ ID NO: 300421 - DNA, 25 bp, probe
ttcccagtggccaaggaaccttcaa

SEQ ID NO: 300422 - DNA, 25 bp, probe
ttcccagtggccaaggaaccttcaa

SEQ ID NO: 300423 - DNA, 25 bp, probe
ttccctgttgcctagaagggctcca

SEQ ID NO: 300424 - DNA, 25 bp, probe
ttctccttattctgttggcgttgtt

SEQ ID NO: 300425 - DNA, 25 bp, probe
ttcccttttaagactctgttgatgt

SEQ ID NO: 300426 - DNA, 25 bp, probe
ttccttgttgatattgcttttgtgt

SEQ ID NO: 300427 - DNA, 25 bp, probe
ttccacagtcatttcttctaggttt

SEQ ID NO: 300428 - DNA, 25 bp, probe
ttgtccagatatgtccttaggtcct

SEQ ID NO: 300429 - DNA, 25 bp, probe
ttgtccgaatcgcactgtatttcca

SEQ ID NO: 300430 - DNA, 25 bp, probe
ttgccctgaataccattttctaccc

SEQ ID NO: 300431 - DNA, 25 bp, probe
ttccctgcttgatattttgcacagc

SEQ ID NO: 300432 - DNA, 25 bp, probe
ttccacatggtatagttactgagtc

SEQ ID NO: 300433 - DNA, 25 bp, probe
ttccaggagaatttatctactgagc

SEQ ID NO: 300434 - DNA, 25 bp, probe
ttccaaaaagattcatccaggtgta

SEQ ID NO: 300435 - DNA, 25 bp, probe
ttccaaaaagattcatccaggtgta

SEQ ID NO: 300436 - DNA, 25 bp, probe
ttccagaatcccagatccgggctac

SEQ ID NO: 300437 - DNA, 25 bp, probe
ttctccatacccacaatctgagcac

SEQ ID NO: 300438 - DNA, 25 bp, probe
ttctccaagcaaagccatatggagc

SEQ ID NO: 300439 - DNA, 25 bp, probe
ttcccagtcagaggcgctatgtgta

SEQ ID NO: 300440 - DNA, 25 bp, probe
ttctccagccgcagcgatgtctgga

SEQ ID NO: 300441 - DNA, 25 bp, probe
ttctccatacgcactggtatgtgtg

SEQ ID NO: 300442 - DNA, 25 bp, probe
ttctccatacgcactggtatgtgtg

SEQ ID NO: 300443 - DNA, 25 bp, probe
ttctgtcttctcaaccgtagatgct

SEQ ID NO: 300444 - DNA, 25 bp, probe
ttctgatctcttatactgtcatcct

SEQ ID NO: 300445 - DNA, 25 bp, probe
ttctgaccattttgtatgtgtcctt

SEQ ID NO: 300446 - DNA, 25 bp, probe
ttctgcacctcaaaggggatccctg

SEQ ID NO: 300447 - DNA, 25 bp, probe
ttctgcacctcaaaggggatccctg

SEQ ID NO: 300448 - DNA, 25 bp, probe
ttctgcagcctctgtgtgtggacac

SEQ ID NO: 300449 - DNA, 25 bp, probe
ttctcctgctgattgtgtgtgtgaa

SEQ ID NO: 300450 - DNA, 25 bp, probe
ttccatctgctgtagcaatggctaa

SEQ ID NO: 300451 - DNA, 25 bp, probe
ttcctcatgatgaccattgcctaca

SEQ ID NO: 300452 - DNA, 25 bp, probe
ttcctcatgatgaccattgcctaca

SEQ ID NO: 300453 - DNA, 25 bp, probe
ttcctcagtgactttacatataaga

SEQ ID NO: 300454 - DNA, 25 bp, probe
ttcccattcttttacttagtgcatt

SEQ ID NO: 300455 - DNA, 25 bp, probe
ttcctttcttagattctcagctgat

SEQ ID NO: 300456 - DNA, 25 bp, probe
ttctgcttctttagggatgccctgt

SEQ ID NO: 300457 - DNA, 25 bp, probe
ttcctgtctttgagattgacctgac

SEQ ID NO: 300458 - DNA, 25 bp, probe
ttccgtcttcttaatctgaagcttc

SEQ ID NO: 300459 - DNA, 25 bp, probe
ttccagtcttattgtattaaccagc

SEQ ID NO: 300460 - DNA, 25 bp, probe
ttccaggaaatacttgtgaagccag

SEQ ID NO: 300461 - DNA, 25 bp, probe
ttcgtagatcaatgtttaactcagc

SEQ ID NO: 300462 - DNA, 25 bp, probe
cttctttgtgtctgtgttctactgt

SEQ ID NO: 300463 - DNA, 25 bp, probe
ttctgtatatgattctctgtggttt

SEQ ID NO: 300464 - DNA, 25 bp, probe
ttctgtgatgtgttgggcgtggttg

SEQ ID NO: 300465 - DNA, 25 bp, probe
ttctgacatgtggtgagttgtgtgt

SEQ ID NO: 300466 - DNA, 25 bp, probe
ttctgacagttccagcacgtgtgtc

SEQ ID NO: 300467 - DNA, 25 bp, probe
ttccattgtgaccagcagcaggctt

SEQ ID NO: 300468 - DNA, 25 bp, probe
ttcgagagctggggcagggctcctt

SEQ ID NO: 300469 - DNA, 25 bp, probe
ttctggccgagagtagggcagctgc

SEQ ID NO: 300470 - DNA, 25 bp, probe
ttctggccgtggcagtcgacagata

SEQ ID NO: 300471 - DNA, 25 bp, probe
ttctccacctggcagaaaagtaact

SEQ ID NO: 300472 - DNA, 25 bp, probe
ttcccctagctgtaaaacagggacg

SEQ ID NO: 300473 - DNA, 25 bp, probe
ttctccttactgggatagtcaggta

SEQ ID NO: 300474 - DNA, 25 bp, probe
ttctccttatctgtgcagtacaggt

SEQ ID NO: 300475 - DNA, 25 bp, probe
ttctgcctctaagctgctctaaagt

SEQ ID NO: 300476 - DNA, 25 bp, probe
ttccacttacaattcctaatcttga

SEQ ID NO: 300477 - DNA, 25 bp, probe
ttccaccaaggtacctacattctac

SEQ ID NO: 300478 - DNA, 25 bp, probe
ttccagaaaagcgtcccacatttca

SEQ ID NO: 300479 - DNA, 25 bp, probe
ttccggcagaacgcatccactttca

SEQ ID NO: 300480 - DNA, 25 bp, probe
ttccctgaggaggttccctttgtga

SEQ ID NO: 300481 - DNA, 25 bp, probe
ttccctgaggaggttccctttgtga

SEQ ID NO: 300482 - DNA, 25 bp, probe
ttgcaactgggagacttccgggggc

SEQ ID NO: 300483 - DNA, 25 bp, probe
ttgcaactgggagacttccgggggc

SEQ ID NO: 300484 - DNA, 25 bp, probe
ttcgcctgggagcagttccgaaatg

SEQ ID NO: 300485 - DNA, 25 bp, probe
ttccctggggaacttatcgacaatg

SEQ ID NO: 300486 - DNA, 25 bp, probe
ttcccataaggatcatctctctgaa

SEQ ID NO: 300487 - DNA, 25 bp, probe
ttcccatcaatggatacccaatacc

SEQ ID NO: 300488 - DNA, 25 bp, probe
ttcgccgcacatcatcagcgcgcaa

SEQ ID NO: 300489 - DNA, 25 bp, probe
ttccctcacatgccatccagtgaga

SEQ ID NO: 300490 - DNA, 25 bp, probe
ttctgccacgtgcacaagctggaga

SEQ ID NO: 300491 - DNA, 25 bp, probe
ttctgatcctgtcagtcagggatgc

SEQ ID NO: 300492 - DNA, 25 bp, probe
ttcctccgttatacaaggagctctt

SEQ ID NO: 300493 - DNA, 25 bp, probe
ttccctgtattttcagaagacattt

SEQ ID NO: 300494 - DNA, 25 bp, probe
ttcctggaatttccaaagcttttgg

SEQ ID NO: 300495 - DNA, 25 bp, probe
ttccttgaagttcttagcataatgt

SEQ ID NO: 300496 - DNA, 25 bp, probe
ttcgtttttctgttaagtgagtgat

SEQ ID NO: 300497 - DNA, 25 bp, probe
ttcgtttctcgttgcctaagatgtt

SEQ ID NO: 300498 - DNA, 25 bp, probe
ttccttttagactcaccagagatat

SEQ ID NO: 300499 - DNA, 25 bp, probe
ttccatctttaagttcccagaccaa

SEQ ID NO: 300500 - DNA, 25 bp, probe
ttccagagttagatcctctcagaac

SEQ ID NO: 300501 - DNA, 25 bp, probe
ttccaggtagtgctgcttctgaagt

SEQ ID NO: 300502 - DNA, 25 bp, probe
ttccaactcagaagctcttcgtagt

SEQ ID NO: 300503 - DNA, 25 bp, probe
ttcctgacaaaagttccatatagac

SEQ ID NO: 300504 - DNA, 25 bp, probe
ttctggacaaacttctgcgatacga

SEQ ID NO: 300505 - DNA, 25 bp, probe
ttctgagacacagctgccagcaaac

SEQ ID NO: 300506 - DNA, 25 bp, probe
ttctgtgactcaactgcccagacac

SEQ ID NO: 300507 - DNA, 25 bp, probe
ttctccactcagatagcgcatgaac

SEQ ID NO: 300508 - DNA, 25 bp, probe
ttcccactcaatacgctggagtcca

SEQ ID NO: 300509 - DNA, 25 bp, probe
ttccccatcgagactgtggtgtgcc

SEQ ID NO: 300510 - DNA, 25 bp, probe
ttccccatgttgtcgatggggccag

SEQ ID NO: 300511 - DNA, 25 bp, probe
ttcccagagttgttaatgtggtgac

SEQ ID NO: 300512 - DNA, 25 bp, probe
ttgcccaagttgaaacaggggccca

SEQ ID NO: 300513 - DNA, 25 bp, probe
ttccgcggactgaagggcaggaccc

SEQ ID NO: 300514 - DNA, 25 bp, probe
ttcgggatgaccatggactggatgc

SEQ ID NO: 300515 - DNA, 25 bp, probe
ttctgtgttacagttggacactatg

SEQ ID NO: 300516 - DNA, 25 bp, probe
ttcctcctgaacatggaccgattgg

SEQ ID NO: 300517 - DNA, 25 bp, probe
ttcctcatcgactgtggaccttgta

SEQ ID NO: 300518 - DNA, 25 bp, probe
ttccttcggctgctggacggtataa

SEQ ID NO: 300519 - DNA, 25 bp, probe
ttcctctcgggcatgaccggaaagg

SEQ ID NO: 300520 - DNA, 25 bp, probe
ttcgcattcggcgttatctggaaag

SEQ ID NO: 300521 - DNA, 25 bp, probe
ttctgcctgtgtgcttatgttaaaa

SEQ ID NO: 300522 - DNA, 25 bp, probe
ttcgccatgggggtctttgaacaca

SEQ ID NO: 300523 - DNA, 25 bp, probe
ttcgccaagggcgttttcaacgcct

SEQ ID NO: 300524 - DNA, 25 bp, probe
ttccacaagagggcttttccacact

SEQ ID NO: 300525 - DNA, 25 bp, probe
ttcgaacatatgcagttattccact

SEQ ID NO: 300526 - DNA, 25 bp, probe
ttcgaagatctccgctgtattacaa

SEQ ID NO: 300527 - DNA, 25 bp, probe
ttcgaagatctccgctgtattacaa

SEQ ID NO: 300528 - DNA, 25 bp, probe
ttcgagaatgccttctatttctgct

SEQ ID NO: 300529 - DNA, 25 bp, probe
ttccaagagccccatttttgctggg

SEQ ID NO: 300530 - DNA, 25 bp, probe
ttccaaggtgcacattttccacgga

SEQ ID NO: 300531 - DNA, 25 bp, probe
ttgccataggtgcctttaccaatgg

SEQ ID NO: 300532 - DNA, 25 bp, probe
ttgccataggtgcctttaccaatgg

SEQ ID NO: 300533 - DNA, 25 bp, probe
ttccagatggctctaacctcagtgg

SEQ ID NO: 300534 - DNA, 25 bp, probe
ttctgcagatgtccctaaggtagag

SEQ ID NO: 300535 - DNA, 25 bp, probe
ttctgcagatgtccctaaggtagag

SEQ ID NO: 300536 - DNA, 25 bp, probe
ttctgctgcttcgctgcagggataa

SEQ ID NO: 300537 - DNA, 25 bp, probe
ttctgctgtctccctgaagagtgaa

SEQ ID NO: 300538 - DNA, 25 bp, probe
ttcctgctcacactccagaattaaa

SEQ ID NO: 300539 - DNA, 25 bp, probe
ttcccccgatccaagttgtagatgg

SEQ ID NO: 300540 - DNA, 25 bp, probe
ttcccccgatccaagttgtagatgg

SEQ ID NO: 300541 - DNA, 25 bp, probe
ttccctcctgtgtcaagtagctaac

SEQ ID NO: 300542 - DNA, 25 bp, probe
ttccactactgctaccacaactata

SEQ ID NO: 300543 - DNA, 25 bp, probe
ttcccaccagaagccaactatcttt

SEQ ID NO: 300544 - DNA, 25 bp, probe
ttcccaaagcaagcaagaggccgtg

SEQ ID NO: 300545 - DNA, 25 bp, probe
ttcccaaagcaagcacctgggtgtg

SEQ ID NO: 300546 - DNA, 25 bp, probe
ttctgctaaggagggacccgtgttg

SEQ ID NO: 300547 - DNA, 25 bp, probe
ttcgatgagacctgtacccgatttt

SEQ ID NO: 300548 - DNA, 25 bp, probe
ttcgggagctcggtaccagagtgta

SEQ ID NO: 300549 - DNA, 25 bp, probe
ttggggagcccagcaccatgggcta

SEQ ID NO: 300550 - DNA, 25 bp, probe
ttgggaggccaagtcgggcggatca

SEQ ID NO: 300551 - DNA, 25 bp, probe
ttctgcgaggtctacgtgggggacg

SEQ ID NO: 300552 - DNA, 25 bp, probe
ttctgcgaggtctacgtgggggacg

SEQ ID NO: 300553 - DNA, 25 bp, probe
ttcggaagtctaagcagggcaggaa

SEQ ID NO: 300554 - DNA, 25 bp, probe
ttcggacatgactacagagctggag

SEQ ID NO: 300555 - DNA, 25 bp, probe
ttcggacatgactacagagctggag

SEQ ID NO: 300556 - DNA, 25 bp, probe
ttcgacatcgtcaagcagaggagga

SEQ ID NO: 300557 - DNA, 25 bp, probe
ttggaacagtctacaagggaaagtg

SEQ ID NO: 300558 - DNA, 25 bp, probe
ttcgatacttacacaaggagaagag

SEQ ID NO: 300559 - DNA, 25 bp, probe
ttctgttttgaagctcatgggaaaa

SEQ ID NO: 300560 - DNA, 25 bp, probe
ttgctgttgtgttcaccatggctgt

SEQ ID NO: 300561 - DNA, 25 bp, probe
ttgctgttgtgttcaccatggctgt

SEQ ID NO: 300562 - DNA, 25 bp, probe
ttctgactctgtaaaatggctctgg

SEQ ID NO: 300563 - DNA, 25 bp, probe
ttctgtctcttgcataagcctcagg

SEQ ID NO: 300564 - DNA, 25 bp, probe
ttctgtccatgtgggagacccagga

SEQ ID NO: 300565 - DNA, 25 bp, probe
ttctgtgtgctggggtggcccaggg

SEQ ID NO: 300566 - DNA, 25 bp, probe
ttcgtgatctggggatgtgccaccc

SEQ ID NO: 300567 - DNA, 25 bp, probe
ttctggaggcagtgctgtgccctcc

SEQ ID NO: 300568 - DNA, 25 bp, probe
ttctgcaaggactgtgttcccgaga

SEQ ID NO: 300569 - DNA, 25 bp, probe
ttctgcaaggaaaagcccccgaaag

SEQ ID NO: 300570 - DNA, 25 bp, probe
ttctgcaaggaaaagcccccgaaag

SEQ ID NO: 300571 - DNA, 25 bp, probe
ttctgcaaggcagtaattcccctta

SEQ ID NO: 300572 - DNA, 25 bp, probe
ttccaaaattacttctctctatctg

SEQ ID NO: 300573 - DNA, 25 bp, probe
ttcccatgagatttgcttacttttg

SEQ ID NO: 300574 - DNA, 25 bp, probe
ttcccatgagatttgcttacttttg

SEQ ID NO: 300575 - DNA, 25 bp, probe
ttcccatggatgaacattcctgtcc

SEQ ID NO: 300576 - DNA, 25 bp, probe
ttcgccatgttgaccaggctggtct

SEQ ID NO: 300577 - DNA, 25 bp, probe
ttcgtgatcgtgtccatggtggtgc

SEQ ID NO: 300578 - DNA, 25 bp, probe
ttcgtgatcgtgtccatggtggtgc

SEQ ID NO: 300579 - DNA, 25 bp, probe
ttcgaagctatgcccaggtgatgtg

SEQ ID NO: 300580 - DNA, 25 bp, probe
ttctgaacatgctccaggccatcag

SEQ ID NO: 300581 - DNA, 25 bp, probe
ttctggacagtgtccaacctcatgg

SEQ ID NO: 300582 - DNA, 25 bp, probe
ttctgcagagattcccaacctggga

SEQ ID NO: 300583 - DNA, 25 bp, probe
ttctggcagctagttagtgccatgg

SEQ ID NO: 300584 - DNA, 25 bp, probe
ttgcatgtgactctgaagctgacga

SEQ ID NO: 300585 - DNA, 25 bp, probe
ttcgtagctgaatatgtgattaatt

SEQ ID NO: 300586 - DNA, 25 bp, probe
ttcgtcattcaattgctggaataat

SEQ ID NO: 300587 - DNA, 25 bp, probe
ttcccttgctagtgtgcagatattt

SEQ ID NO: 300588 - DNA, 25 bp, probe
ttcccttgcctgtatggagcatctg

SEQ ID NO: 300589 - DNA, 25 bp, probe
ttcctcttcctggatctgagaattt

SEQ ID NO: 300590 - DNA, 25 bp, probe
ttcgcagttactggttggtgttctt

SEQ ID NO: 300591 - DNA, 25 bp, probe
ttctggctgtcagtcgtgttgctta

SEQ ID NO: 300592 - DNA, 25 bp, probe
ttcgtgtgctgctaaggtatgctta

SEQ ID NO: 300593 - DNA, 25 bp, probe
ttcgtgggcacaaggtcctacatgt

SEQ ID NO: 300594 - DNA, 25 bp, probe
ttctgtgggccacagtccatactac

SEQ ID NO: 300595 - DNA, 25 bp, probe
ttctgaagaccacagtcactcctga

SEQ ID NO: 300596 - DNA, 25 bp, probe
ttcgaggagacacgattcaccgcgg

SEQ ID NO: 300597 - DNA, 25 bp, probe
ttcggggacatgctgtgtcctcgtg

SEQ ID NO: 300598 - DNA, 25 bp, probe
ttcgagggaatatgcgaagctgccg

SEQ ID NO: 300599 - DNA, 25 bp, probe
ttgcggtgaagattatggaagtgac

SEQ ID NO: 300600 - DNA, 25 bp, probe
ttcggctcagagaaagccaagtgca

SEQ ID NO: 300601 - DNA, 25 bp, probe
ttccctcgagtggagccagacagca

SEQ ID NO: 300602 - DNA, 25 bp, probe
ttcccatctgttcaggcaaatgcag

SEQ ID NO: 300603 - DNA, 25 bp, probe
ttcccatcatgggccctgaagagga

SEQ ID NO: 300604 - DNA, 25 bp, probe
ttctgagatcagcgtcctaccaaga

SEQ ID NO: 300605 - DNA, 25 bp, probe
ttcgcgtcatgccagcaaattccat

SEQ ID NO: 300606 - DNA, 25 bp, probe
ttccgagatccaccagatcgacttg

SEQ ID NO: 300607 - DNA, 25 bp, probe
ttccgagatccaccagatcgacttg

SEQ ID NO: 300608 - DNA, 25 bp, probe
ttccgagatccaccagatcgacttg

SEQ ID NO: 300609 - DNA, 25 bp, probe
ttcctaatcactcagagcagtctgt

SEQ ID NO: 300610 - DNA, 25 bp, probe
ttccgagctgacggaagcctgtgac

SEQ ID NO: 300611 - DNA, 25 bp, probe
ttccgaaaaccaggccttatctcca

SEQ ID NO: 300612 - DNA, 25 bp, probe
ttccgaaaaccaggccttatctcca

SEQ ID NO: 300613 - DNA, 25 bp, probe
ttcctgaaggatgctgcccttttcc

SEQ ID NO: 300614 - DNA, 25 bp, probe
ttcctacaggagcacggcagttaca

SEQ ID NO: 300615 - DNA, 25 bp, probe
ttgcacccaggaggactctgcattt

SEQ ID NO: 300616 - DNA, 25 bp, probe
ttgcacccaggaggactctgcattt

SEQ ID NO: 300617 - DNA, 25 bp, probe
ttccccatggactatcactgtctgg

SEQ ID NO: 300618 - DNA, 25 bp, probe
ttccccatggactatcactgtctgg

SEQ ID NO: 300619 - DNA, 25 bp, probe
ttccaaatggactagactaccaagt

SEQ ID NO: 300620 - DNA, 25 bp, probe
ttcccaagcagctggacttccagag

SEQ ID NO: 300621 - DNA, 25 bp, probe
ttcccaagcagctggacttccagag

SEQ ID NO: 300622 - DNA, 25 bp, probe
ttgccgaagtgtccgcactgtaaag

SEQ ID NO: 300623 - DNA, 25 bp, probe
ttcccacagtctctcaactacgggg

SEQ ID NO: 300624 - DNA, 25 bp, probe
ttcctacagcgtctccaatagcgag

SEQ ID NO: 300625 - DNA, 25 bp, probe
ttcgtacacaacttccaggagagca

SEQ ID NO: 300626 - DNA, 25 bp, probe
ttggccaaaacgtacggagacaaca

SEQ ID NO: 300627 - DNA, 25 bp, probe
ttggccaaaaagtacagagacaaca

SEQ ID NO: 300628 - DNA, 25 bp, probe
ttggccgaaatgctctggaacgaca

SEQ ID NO: 300629 - DNA, 25 bp, probe
ttggacaagacatttctgaaacctt

SEQ ID NO: 300630 - DNA, 25 bp, probe
ttggactcgtttatggcacagccat

SEQ ID NO: 300631 - DNA, 25 bp, probe
ttggcccaagtttatggcctggaga

SEQ ID NO: 300632 - DNA, 25 bp, probe
ttggcccaaccttttcataggagat

SEQ ID NO: 300633 - DNA, 25 bp, probe
ttgagcctgaccatacacttaggaa

SEQ ID NO: 300634 - DNA, 25 bp, probe
ttgcaaggactaaaagctataggaa

SEQ ID NO: 300635 - DNA, 25 bp, probe
ttccacgacctctaagccgagagag

SEQ ID NO: 300636 - DNA, 25 bp, probe
ttccaccacttgtgtccatggagca

SEQ ID NO: 300637 - DNA, 25 bp, probe
ttccccaactgtgtccatggcagaa

SEQ ID NO: 300638 - DNA, 25 bp, probe
ttccccacacgtgtgtaagctcatg

SEQ ID NO: 300639 - DNA, 25 bp, probe
ttccctcccgtgaatgtgaagttcc

SEQ ID NO: 300640 - DNA, 25 bp, probe
ttcctccctcaatagtgaagtgtca

SEQ ID NO: 300641 - DNA, 25 bp, probe
ttcctcccacaggaagaaatgtaca

SEQ ID NO: 300642 - DNA, 25 bp, probe
ttcccccagctgtaagacagggacg

SEQ ID NO: 300643 - DNA, 25 bp, probe
ttcccctgcagttcaaatgcaggac

SEQ ID NO: 300644 - DNA, 25 bp, probe
ttcctcctccttgaatctgagactg

SEQ ID NO: 300645 - DNA, 25 bp, probe
ttcgcatcttctctacagtgctgag

SEQ ID NO: 300646 - DNA, 25 bp, probe
ttccttcattccaacgactgagtga

SEQ ID NO: 300647 - DNA, 25 bp, probe
ttcctctcttctcactttgagattg

SEQ ID NO: 300648 - DNA, 25 bp, probe
ttccataccgttactctgatgaatt

SEQ ID NO: 300649 - DNA, 25 bp, probe
ttcctcccagtgacaatatggaatt

SEQ ID NO: 300650 - DNA, 25 bp, probe
ttcctgcctatggtgagatcagatg

SEQ ID NO: 300651 - DNA, 25 bp, probe
ttcctgagctgaccaagccagagat

SEQ ID NO: 300652 - DNA, 25 bp, probe
ttcctgagctgaccaagccagagat

SEQ ID NO: 300653 - DNA, 25 bp, probe
ttccagaatacccatgccattgaca

SEQ ID NO: 300654 - DNA, 25 bp, probe
ttgtggtttccattgcctatggaag

SEQ ID NO: 300655 - DNA, 25 bp, probe
ttccagccttccttcctgggcatgg

SEQ ID NO: 300656 - DNA, 25 bp, probe
ttcctccttcctactcaaagaggtg

SEQ ID NO: 300657 - DNA, 25 bp, probe
ttcctccttcctactcaaagaggtg

SEQ ID NO: 300658 - DNA, 25 bp, probe
ttccctgctgtcgtcttagcaagaa

SEQ ID NO: 300659 - DNA, 25 bp, probe
ttccctgctgtcgtcttagcaagaa

SEQ ID NO: 300660 - DNA, 25 bp, probe
ttccactccatctcttacaagatcg

SEQ ID NO: 300661 - DNA, 25 bp, probe
ttccactccatctcttacaagatcg

SEQ ID NO: 300662 - DNA, 25 bp, probe
ttcgatcttcataacggacaaactg

SEQ ID NO: 300663 - DNA, 25 bp, probe
ttcgatttgatgtctcggagaataa

SEQ ID NO: 300664 - DNA, 25 bp, probe
ttccagcttggactcatgaaggatt

SEQ ID NO: 300665 - DNA, 25 bp, probe
ttccagcctgggtcacagagtgaaa

SEQ ID NO: 300666 - DNA, 25 bp, probe
ttcctggtgaggtccaagctgttgc

SEQ ID NO: 300667 - DNA, 25 bp, probe
ttcctgggaggatcaagctagactt

SEQ ID NO: 300668 - DNA, 25 bp, probe
ttcctgggaggatcaagctagactt

SEQ ID NO: 300669 - DNA, 25 bp, probe
ttcccgagagaattaagacagactg

SEQ ID NO: 300670 - DNA, 25 bp, probe
ttccctatgggttctgtgaccactg

SEQ ID NO: 300671 - DNA, 25 bp, probe
ttccctgagttttgcttattcactg

SEQ ID NO: 300672 - DNA, 25 bp, probe
ttccctggttatactttgtcaatag

SEQ ID NO: 300673 - DNA, 25 bp, probe
ttccctggaatacctttgcatcaca

SEQ ID NO: 300674 - DNA, 25 bp, probe
ttcccaggcaatacacctctgaaca

SEQ ID NO: 300675 - DNA, 25 bp, probe
ttcccaggcaatacacctctgaaca

SEQ ID NO: 300676 - DNA, 25 bp, probe
ttcccagagtcaacctcctgtgaca

SEQ ID NO: 300677 - DNA, 25 bp, probe
ttcccagagtcatcctcagttgacg

SEQ ID NO: 300678 - DNA, 25 bp, probe
ttcgtaagccaagctgtgtgtgccg

SEQ ID NO: 300679 - DNA, 25 bp, probe
ttcgtcaggatatgcttgttctgca

SEQ ID NO: 300680 - DNA, 25 bp, probe
ttcccactgtgtccatctatggtag

SEQ ID NO: 300681 - DNA, 25 bp, probe
ttccccctttcaatgatgaaacacc

SEQ ID NO: 300682 - DNA, 25 bp, probe
ttcccacctttaatgaatcccatca

SEQ ID NO: 300683 - DNA, 25 bp, probe
ttccaaccattaaggtccacaccat

SEQ ID NO: 300684 - DNA, 25 bp, probe
ttcgcacatttttggctgtcccaaa

SEQ ID NO: 300685 - DNA, 25 bp, probe
ttcgcacatttttggctgtcccaaa

SEQ ID NO: 300686 - DNA, 25 bp, probe
ttcgccatctattgcgtggtgggca

SEQ ID NO: 300687 - DNA, 25 bp, probe
ttcgccctatcattggagatgttga

SEQ ID NO: 300688 - DNA, 25 bp, probe
ttcccatgcatttactagattctag

SEQ ID NO: 300689 - DNA, 25 bp, probe
ttcgctcattccaactaatcatcat

SEQ ID NO: 300690 - DNA, 25 bp, probe
ttcctattccaagcttccatagctg

SEQ ID NO: 300691 - DNA, 25 bp, probe
ttcctttctcactgccttgagagtg

SEQ ID NO: 300692 - DNA, 25 bp, probe
ttcctttctcactgccttgagagtg

SEQ ID NO: 300693 - DNA, 25 bp, probe
ttcctctcccaggtgtttgtggggc

SEQ ID NO: 300694 - DNA, 25 bp, probe
ttcctcttcaacagggagctgaggg

SEQ ID NO: 300695 - DNA, 25 bp, probe
ttcctcttcaacagggagctgaggg

SEQ ID NO: 300696 - DNA, 25 bp, probe
ttcctttctcacagtgacaggaagg

SEQ ID NO: 300697 - DNA, 25 bp, probe
ttcctgtgtctctgggagcggagac

SEQ ID NO: 300698 - DNA, 25 bp, probe
ttcctgtagctctggggccaggtca

SEQ ID NO: 300699 - DNA, 25 bp, probe
ttcccaagcccaaaggatcaggtgc

SEQ ID NO: 300700 - DNA, 25 bp, probe
ttcccaaccctggcaggtgcttgtg

SEQ ID NO: 300701 - DNA, 25 bp, probe
ttccatcaactcatggcaggggtgg

SEQ ID NO: 300702 - DNA, 25 bp, probe
ttccagagcactgctccagtggggc

SEQ ID NO: 300703 - DNA, 25 bp, probe
ttccgatcagtggtgtctgtgaagg

SEQ ID NO: 300704 - DNA, 25 bp, probe
ttccgatcagtggtgtctgtgaagg

SEQ ID NO: 300705 - DNA, 25 bp, probe
ttccaaagatgagtttgtatcatgg

SEQ ID NO: 300706 - DNA, 25 bp, probe
ttcctgggcacagtttggtccgtta

SEQ ID NO: 300707 - DNA, 25 bp, probe
ttcctgggaagatacggcctgcttc

SEQ ID NO: 300708 - DNA, 25 bp, probe
ttcctgggaagatacggcctgcttc

SEQ ID NO: 300709 - DNA, 25 bp, probe
ttcccaggaggagagcagcccatgt

SEQ ID NO: 300710 - DNA, 25 bp, probe
ttcccttgaggaaacaacagcttta

SEQ ID NO: 300711 - DNA, 25 bp, probe
ttccctttggagacacaacaggcag

SEQ ID NO: 300712 - DNA, 25 bp, probe
ttcctcaggtggttcatccaaggcc

SEQ ID NO: 300713 - DNA, 25 bp, probe
ttcctaggtggctgctttgcagggc

SEQ ID NO: 300714 - DNA, 25 bp, probe
ttcctcaggagcacgccgtgagatg

SEQ ID NO: 300715 - DNA, 25 bp, probe
ttcctgctgggcacagtgggcaatg

SEQ ID NO: 300716 - DNA, 25 bp, probe
ttcctgtctgacacctggagcatgg

SEQ ID NO: 300717 - DNA, 25 bp, probe
ttccacatctacaacgtgggcacgc

SEQ ID NO: 300718 - DNA, 25 bp, probe
ttccgcactatctacctgaatactc

SEQ ID NO: 300719 - DNA, 25 bp, probe
ttcctgcgcttctactcagataact

SEQ ID NO: 300720 - DNA, 25 bp, probe
ttcgctggcgtctacagcaacgagc

SEQ ID NO: 300721 - DNA, 25 bp, probe
ttgccgtggactagcaatacctgca

SEQ ID NO: 300722 - DNA, 25 bp, probe
ttccgggactgtgaccctgaggact

SEQ ID NO: 300723 - DNA, 25 bp, probe
ttgaagggcagtgttccctggggct

SEQ ID NO: 300724 - DNA, 25 bp, probe
ttgaagctcggtgtaccgcgggaca

SEQ ID NO: 300725 - DNA, 25 bp, probe
ttgaagctcggtgtaccgcgggaca

SEQ ID NO: 300726 - DNA, 25 bp, probe
ttgatagagaggtacgtttgcggga

SEQ ID NO: 300727 - DNA, 25 bp, probe
ttgagagagggacctggccagggtg

SEQ ID NO: 300728 - DNA, 25 bp, probe
ttggagtggtcagctgggcaagtgg

SEQ ID NO: 300729 - DNA, 25 bp, probe
ttggagtggtcagctgggcaagtgg

SEQ ID NO: 300730 - DNA, 25 bp, probe
ttgagcgggacagcttgatgccctc

SEQ ID NO: 300731 - DNA, 25 bp, probe
ttccgggcagcaggatcgacgccca

SEQ ID NO: 300732 - DNA, 25 bp, probe
ttccgggcagcaggatcgacgccca

SEQ ID NO: 300733 - DNA, 25 bp, probe
ttccaggaggacatctactgccaca

SEQ ID NO: 300734 - DNA, 25 bp, probe
ttccaggaggacatctactgccaca

SEQ ID NO: 300735 - DNA, 25 bp, probe
ttccaagcagtaaactacctaccaa

SEQ ID NO: 300736 - DNA, 25 bp, probe
ttgccaaggttaagtcctcttccaa

SEQ ID NO: 300737 - DNA, 25 bp, probe
ttgccaaggttaagtcctcttccaa

SEQ ID NO: 300738 - DNA, 25 bp, probe
ttccagactgtgccaagtttcttac

SEQ ID NO: 300739 - DNA, 25 bp, probe
ttccagactgtgccaagtttcttac

SEQ ID NO: 300740 - DNA, 25 bp, probe
ttcctgactgttcctctttttaaga

SEQ ID NO: 300741 - DNA, 25 bp, probe
ttcctgactgttcctctttttaaga

SEQ ID NO: 300742 - DNA, 25 bp, probe
ttctgtgtttgttttgcactttaaa

SEQ ID NO: 300743 - DNA, 25 bp, probe
ttctgtgttatttttatgcttctta

SEQ ID NO: 300744 - DNA, 25 bp, probe
ttcggcatccttggttgaattctta

SEQ ID NO: 300745 - DNA, 25 bp, probe
ttctggcatgcgtttattaatttat

SEQ ID NO: 300746 - DNA, 25 bp, probe
ttctggctgtgtttttataacttat

SEQ ID NO: 300747 - DNA, 25 bp, probe
ttctggctgtgtttttataacttat

SEQ ID NO: 300748 - DNA, 25 bp, probe
ttctggcttgtcattctgtacactg

SEQ ID NO: 300749 - DNA, 25 bp, probe
ttctgggctacactatctaacatct

SEQ ID NO: 300750 - DNA, 25 bp, probe
ttggcgtgccaggtgtctacaccaa

SEQ ID NO: 300751 - DNA, 25 bp, probe
ttgaagtgcgctctttgcaatccag

SEQ ID NO: 300752 - DNA, 25 bp, probe
ttgaagtgcgctctttgcaatccag

SEQ ID NO: 300753 - DNA, 25 bp, probe
ttgacatggcgcaactctatgcccg

SEQ ID NO: 300754 - DNA, 25 bp, probe
ttgtgagccgccaatatcatcacca

SEQ ID NO: 300755 - DNA, 25 bp, probe
ttgattcctgctgtattgaccagtc

SEQ ID NO: 300756 - DNA, 25 bp, probe
ttgagaactgatgtaattcgtggcc

SEQ ID NO: 300757 - DNA, 25 bp, probe
ttgagtacgtcaagaatgaggacct

SEQ ID NO: 300758 - DNA, 25 bp, probe
ttgattcatctgtaaaagggtctag

SEQ ID NO: 300759 - DNA, 25 bp, probe
ttgagatacagctccagacgcgtta

SEQ ID NO: 300760 - DNA, 25 bp, probe
ttcgtgcacactgcacacggtgtct

SEQ ID NO: 300761 - DNA, 25 bp, probe
ttcgatgccatcagcactctgaggg

SEQ ID NO: 300762 - DNA, 25 bp, probe
ttgcaaccatagccttatggggagt

SEQ ID NO: 300763 - DNA, 25 bp, probe
ttgcaatccagggttctggaaagtg

SEQ ID NO: 300764 - DNA, 25 bp, probe
ttgcgtagcagccctcacaaaaagg

SEQ ID NO: 300765 - DNA, 25 bp, probe
ttgcctagcctgggcctaaaaatgc

SEQ ID NO: 300766 - DNA, 25 bp, probe
ttcccagcatcagccttagaacaag

SEQ ID NO: 300767 - DNA, 25 bp, probe
ttcgtcctgcatgtctctaacatta

SEQ ID NO: 300768 - DNA, 25 bp, probe
ttcctcactgctgttcacgagattg

SEQ ID NO: 300769 - DNA, 25 bp, probe
ttctggcagctgtggtacaaatgtg

SEQ ID NO: 300770 - DNA, 25 bp, probe
ttgctgctgcagtgggtcaagacgg

SEQ ID NO: 300771 - DNA, 25 bp, probe
ttgctctaggcagactaaagggggt

SEQ ID NO: 300772 - DNA, 25 bp, probe
ttgctctaggcagactaaagggggt

SEQ ID NO: 300773 - DNA, 25 bp, probe
ttcctaggcttggctggcaatggcc

SEQ ID NO: 300774 - DNA, 25 bp, probe
ttcctaggcttggctggcaatggcc

SEQ ID NO: 300775 - DNA, 25 bp, probe
ttccccctggatgggctatagccag

SEQ ID NO: 300776 - DNA, 25 bp, probe
ttccccctggatgggctatagccag

SEQ ID NO: 300777 - DNA, 25 bp, probe
ttcccgactgtggcggttagcattg

SEQ ID NO: 300778 - DNA, 25 bp, probe
ttcccgactgtaagcagttctattg

SEQ ID NO: 300779 - DNA, 25 bp, probe
ttcctctacagaagtggtgtctact

SEQ ID NO: 300780 - DNA, 25 bp, probe
ttccatccaaatatgaatgctccct

SEQ ID NO: 300781 - DNA, 25 bp, probe
ttccatccataaatccagttctact

SEQ ID NO: 300782 - DNA, 25 bp, probe
ttcccataacatcccagatactatc

SEQ ID NO: 300783 - DNA, 25 bp, probe
ttcccaaaccaaagcatcattcatc

SEQ ID NO: 300784 - DNA, 25 bp, probe
ttcctcaagagcccaatgcattcca

SEQ ID NO: 300785 - DNA, 25 bp, probe
ttcctccatgataacaagctgacac

SEQ ID NO: 300786 - DNA, 25 bp, probe
ttcccctgcatgacactgattacaa

SEQ ID NO: 300787 - DNA, 25 bp, probe
ttcccactttctaattcacagaagc

SEQ ID NO: 300788 - DNA, 25 bp, probe
ttccaacttcctgtggcctgaagaa

SEQ ID NO: 300789 - DNA, 25 bp, probe
ttccagacttccctaatcctaaaat

SEQ ID NO: 300790 - DNA, 25 bp, probe
ttccagacttccctaatcctaaaat

SEQ ID NO: 300791 - DNA, 25 bp, probe
ttccaaccttggtattttatattat

SEQ ID NO: 300792 - DNA, 25 bp, probe
ttccaaccttggtattttatattat

SEQ ID NO: 300793 - DNA, 25 bp, probe
ttccaaacagctgggtttaaatata

SEQ ID NO: 300794 - DNA, 25 bp, probe
ttccaaaagtggcctctttgtctaa

SEQ ID NO: 300795 - DNA, 25 bp, probe
ttcccagagaccaactcttttttat

SEQ ID NO: 300796 - DNA, 25 bp, probe
ttccctaccatcaagccattgtttt

SEQ ID NO: 300797 - DNA, 25 bp, probe
ttccccagccatgagtcagtttgtg

SEQ ID NO: 300798 - DNA, 25 bp, probe
ttccccactattagcaggctttgga

SEQ ID NO: 300799 - DNA, 25 bp, probe
ttcccaatccttagcaatgccttag

SEQ ID NO: 300800 - DNA, 25 bp, probe
ttctggactggtcagcagtgcctta

SEQ ID NO: 300801 - DNA, 25 bp, probe
ttcgagttggagcggctcctctaca

SEQ ID NO: 300802 - DNA, 25 bp, probe
ttcggatatggtggaggacctctac

SEQ ID NO: 300803 - DNA, 25 bp, probe
ttcggcatggtgtatgagggcaatg

SEQ ID NO: 300804 - DNA, 25 bp, probe
ttcggcatggtgtatgagggcaatg

SEQ ID NO: 300805 - DNA, 25 bp, probe
ttccagctagtgtcagcagtgggat

SEQ ID NO: 300806 - DNA, 25 bp, probe
ttcgcactggcgttgagtgggaccc

SEQ ID NO: 300807 - DNA, 25 bp, probe
ttccgctggattgactgggagcggc

SEQ ID NO: 300808 - DNA, 25 bp, probe
ttccctggatattactgggttctct

SEQ ID NO: 300809 - DNA, 25 bp, probe
ttcccttgcatttgaattagttctc

SEQ ID NO: 300810 - DNA, 25 bp, probe
ttccttcctgggcatggagtcctgt

SEQ ID NO: 300811 - DNA, 25 bp, probe
ttcctggcttgaggtaggggctctt

SEQ ID NO: 300812 - DNA, 25 bp, probe
ttcctggctaccatgggccagtgct

SEQ ID NO: 300813 - DNA, 25 bp, probe
ttcctggctaccatgggccagtgct

SEQ ID NO: 300814 - DNA, 25 bp, probe
ttccggctactgacagtggtagagt

SEQ ID NO: 300815 - DNA, 25 bp, probe
ttccccagggcacgtggttgagtgg

SEQ ID NO: 300816 - DNA, 25 bp, probe
ttcctctcggtgctggagtatgcgg

SEQ ID NO: 300817 - DNA, 25 bp, probe
ttccttgcaggagcgtcagttgcgg

SEQ ID NO: 300818 - DNA, 25 bp, probe
ttcctccagtgacctgtcaaggctt

SEQ ID NO: 300819 - DNA, 25 bp, probe
ttccgccagatgtgctgcaaaacct

SEQ ID NO: 300820 - DNA, 25 bp, probe
ttcctgcagaatgtgctcaacaacc

SEQ ID NO: 300821 - DNA, 25 bp, probe
ttccatggacatgttccacacgcgc

SEQ ID NO: 300822 - DNA, 25 bp, probe
ttccatggacatgttccacacgcgc

SEQ ID NO: 300823 - DNA, 25 bp, probe
ttccagccacatatcacaaacgact

SEQ ID NO: 300824 - DNA, 25 bp, probe
ttccagccatcaagcccaagactga

SEQ ID NO: 300825 - DNA, 25 bp, probe
ttccacagcatcaagcagacggccg

SEQ ID NO: 300826 - DNA, 25 bp, probe
ttcccatcactcgaactggcagtgg

SEQ ID NO: 300827 - DNA, 25 bp, probe
ttcccatcactcgaactggcagtgg

SEQ ID NO: 300828 - DNA, 25 bp, probe
ttcctccactcgcaaagcattgtgc

SEQ ID NO: 300829 - DNA, 25 bp, probe
ttccgcacacacctgaaacatgttc

SEQ ID NO: 300830 - DNA, 25 bp, probe
ttccgcacacacctgaaacatgttc

SEQ ID NO: 300831 - DNA, 25 bp, probe
ttcgtcatccaaatatagtcagtct

SEQ ID NO: 300832 - DNA, 25 bp, probe
ttccctccagaattatgtcaggttg

SEQ ID NO: 300833 - DNA, 25 bp, probe
ttcccatcacatgaagacatcaggt

SEQ ID NO: 300834 - DNA, 25 bp, probe
ttccagcaagcacagatgtacaggt

SEQ ID NO: 300835 - DNA, 25 bp, probe
ttgccagaagctcagggtgcatagt

SEQ ID NO: 300836 - DNA, 25 bp, probe
ttcccagagctggagttggctgcag

SEQ ID NO: 300837 - DNA, 25 bp, probe
ttcccgcagtgcaatctttcagcag

SEQ ID NO: 300838 - DNA, 25 bp, probe
ttcccgcagtgcaatctttcagcag

SEQ ID NO: 300839 - DNA, 25 bp, probe
ttcgccagcaacaatgtgaccgata

SEQ ID NO: 300840 - DNA, 25 bp, probe
ttcgccagcaacaatgtgaccgata

SEQ ID NO: 300841 - DNA, 25 bp, probe
ttcgcatcaacacagcagacaccaa

SEQ ID NO: 300842 - DNA, 25 bp, probe
ttcgcatcaacacagcagacaccaa

SEQ ID NO: 300843 - DNA, 25 bp, probe
ttcccaacatgaatgagatgcctca

SEQ ID NO: 300844 - DNA, 25 bp, probe
ttcccagccatattgatggtgatgc

SEQ ID NO: 300845 - DNA, 25 bp, probe
ttcgactggctcttgtgagaatgca

SEQ ID NO: 300846 - DNA, 25 bp, probe
ttcgagccgcattctggagaagact

SEQ ID NO: 300847 - DNA, 25 bp, probe
ttccatcccactgggaaaacgtctc

SEQ ID NO: 300848 - DNA, 25 bp, probe
ttccaccgccggaaactgcaagttc

SEQ ID NO: 300849 - DNA, 25 bp, probe
ttccgctcgccacaaatatgggtac

SEQ ID NO: 300850 - DNA, 25 bp, probe
ttccagccgcagaagaacgtggtta

SEQ ID NO: 300851 - DNA, 25 bp, probe
ttccagcaccgaaattcaagaatta

SEQ ID NO: 300852 - DNA, 25 bp, probe
ttcgactgctccaagaatcagagaa

SEQ ID NO: 300853 - DNA, 25 bp, probe
ttcgagatgatcttgaggaagctga

SEQ ID NO: 300854 - DNA, 25 bp, probe
ttcgagctcatcctcatggaagaga

SEQ ID NO: 300855 - DNA, 25 bp, probe
ttcggcgcatgccagatggtcacac

SEQ ID NO: 300856 - DNA, 25 bp, probe
ttcggcgcatgccagatggtcacac

SEQ ID NO: 300857 - DNA, 25 bp, probe
ttcgaagcagccgtggctactagcc

SEQ ID NO: 300858 - DNA, 25 bp, probe
ttcgtagcagcacctactatgcttc

SEQ ID NO: 300859 - DNA, 25 bp, probe
ttgattatgcagagcatgacttgtg

SEQ ID NO: 300860 - DNA, 25 bp, probe
ttgatatgtgcagttcaagtttcac

SEQ ID NO: 300861 - DNA, 25 bp, probe
ttgaatgatacttcagcaccccatc

SEQ ID NO: 300862 - DNA, 25 bp, probe
ttgaatgtttatggcacctgacttg

SEQ ID NO: 300863 - DNA, 25 bp, probe
ttgacatgctcctggcaactacttc

SEQ ID NO: 300864 - DNA, 25 bp, probe
ttgcaatgctcattcagacaacttc

SEQ ID NO: 300865 - DNA, 25 bp, probe
ttgaggtcagtacctgagctgtcta

SEQ ID NO: 300866 - DNA, 25 bp, probe
ttgacttcaagacgctggctgatgt

SEQ ID NO: 300867 - DNA, 25 bp, probe
ttggcaagaacactgtgcacatggt

SEQ ID NO: 300868 - DNA, 25 bp, probe
ttgatagtgcacgctctgatcaggg

SEQ ID NO: 300869 - DNA, 25 bp, probe
ttgatgtggagctttctgaataggg

SEQ ID NO: 300870 - DNA, 25 bp, probe
ttcgtgcgagaacctgagaagaggc

SEQ ID NO: 300871 - DNA, 25 bp, probe
ttcgtgcaggaagccatgaaaggaa

SEQ ID NO: 300872 - DNA, 25 bp, probe
ttcggagcactcgcctgaagttgaa

SEQ ID NO: 300873 - DNA, 25 bp, probe
ttcggagcactcgcctgaagttgaa

SEQ ID NO: 300874 - DNA, 25 bp, probe
ttccatggacctccacgaacttgaa

SEQ ID NO: 300875 - DNA, 25 bp, probe
ttccgggcctgcacggagctgggca

SEQ ID NO: 300876 - DNA, 25 bp, probe
ttccacgcaccgatcagtactggga

SEQ ID NO: 300877 - DNA, 25 bp, probe
ttccactcccgaatttactgaggaa

SEQ ID NO: 300878 - DNA, 25 bp, probe
ttccctgctccctggagactgggaa

SEQ ID NO: 300879 - DNA, 25 bp, probe
ttcccttgcctcttgtaacgtggca

SEQ ID NO: 300880 - DNA, 25 bp, probe
ttcccttcctttaactcagaggcgg

SEQ ID NO: 300881 - DNA, 25 bp, probe
ttcccttcctttaactcagaggcgg

SEQ ID NO: 300882 - DNA, 25 bp, probe
ttcctttccttttaacatgaaagca

SEQ ID NO: 300883 - DNA, 25 bp, probe
ttcctgttcactctgttaataagaa

SEQ ID NO: 300884 - DNA, 25 bp, probe
ttcctgatcccgatgttagaaatgg

SEQ ID NO: 300885 - DNA, 25 bp, probe
ttcctgtaccccaatctaggaggct

SEQ ID NO: 300886 - DNA, 25 bp, probe
ttcctctacgcctttctagatgaca

SEQ ID NO: 300887 - DNA, 25 bp, probe
ttccctaccactgtgatagtggaca

SEQ ID NO: 300888 - DNA, 25 bp, probe
ttcccctggagtgtgaagctgacca

SEQ ID NO: 300889 - DNA, 25 bp, probe
ttcccctggagtgtgaagctgacca

SEQ ID NO: 300890 - DNA, 25 bp, probe
ttcccctggagtgtgaagctgacca

SEQ ID NO: 300891 - DNA, 25 bp, probe
ttcccctgggattctgaatataaca

SEQ ID NO: 300892 - DNA, 25 bp, probe
ttcccctgatggattagaacacaga

SEQ ID NO: 300893 - DNA, 25 bp, probe
ttcccctgatggattagaacacaga

SEQ ID NO: 300894 - DNA, 25 bp, probe
ttccccttggaaacagcaatcccaa

SEQ ID NO: 300895 - DNA, 25 bp, probe
ttcccgttagggacatcacaccctg

SEQ ID NO: 300896 - DNA, 25 bp, probe
ttccaagttcaacattcactctccg

SEQ ID NO: 300897 - DNA, 25 bp, probe
ttccaagttcaacattcactctccg

SEQ ID NO: 300898 - DNA, 25 bp, probe
ttccatatgttagccatttcctgtc

SEQ ID NO: 300899 - DNA, 25 bp, probe
ttccatttagactactttcctcttc

SEQ ID NO: 300900 - DNA, 25 bp, probe
ttggttaatacatctttccctaaag

SEQ ID NO: 300901 - DNA, 25 bp, probe
ttcctaactacatctatttctataa

SEQ ID NO: 300902 - DNA, 25 bp, probe
ttccaaaccacatcctttacatgta

SEQ ID NO: 300903 - DNA, 25 bp, probe
ttgatcagcagagaaaccaagtcca

SEQ ID NO: 300904 - DNA, 25 bp, probe
ttgccagagcacataacgaagtttt

SEQ ID NO: 300905 - DNA, 25 bp, probe
ttgctagagagcttaccggacgtta

SEQ ID NO: 300906 - DNA, 25 bp, probe
ttgccaagagcttgaagctcgacgt

SEQ ID NO: 300907 - DNA, 25 bp, probe
ttccaaatgctacatcatccttctc

SEQ ID NO: 300908 - DNA, 25 bp, probe
ttccaaatgctacatcatccttctc

SEQ ID NO: 300909 - DNA, 25 bp, probe
ttccgactgctaggaactccatctc

SEQ ID NO: 300910 - DNA, 25 bp, probe
ttccgactgctaggaactccatctc

SEQ ID NO: 300911 - DNA, 25 bp, probe
ttccagacgccaggctacgagatgg

SEQ ID NO: 300912 - DNA, 25 bp, probe
ttccacacgcgcttcaagcaggagg

SEQ ID NO: 300913 - DNA, 25 bp, probe
ttccacacgcgcttcaagcaggagg

SEQ ID NO: 300914 - DNA, 25 bp, probe
ttccaccgtgcaggcctgcaggtgg

SEQ ID NO: 300915 - DNA, 25 bp, probe
ttcccctgtgcaggctcaagagctg

SEQ ID NO: 300916 - DNA, 25 bp, probe
ttccgcctttcgcaagatgatgtga

SEQ ID NO: 300917 - DNA, 25 bp, probe
ttcccttattcactgagagtgatgg

SEQ ID NO: 300918 - DNA, 25 bp, probe
ttcccgcagaacctgaagatgttcg

SEQ ID NO: 300919 - DNA, 25 bp, probe
ttgtcaggcagatctgtgacgggat

SEQ ID NO: 300920 - DNA, 25 bp, probe
ttgacagtcatgattggcagccgga

SEQ ID NO: 300921 - DNA, 25 bp, probe
ttgaagccatcaaggccaccaggcc

SEQ ID NO: 300922 - DNA, 25 bp, probe
ttgagcagctataggaccagcaacc

SEQ ID NO: 300923 - DNA, 25 bp, probe
ttgcactgcatagtgaacctgcaga

SEQ ID NO: 300924 - DNA, 25 bp, probe
ttgccatgcatcagctgcggcgaga

SEQ ID NO: 300925 - DNA, 25 bp, probe
ttgcgacatgacggtgatgctgagc

SEQ ID NO: 300926 - DNA, 25 bp, probe
ttgcagcaagacagctctgagcagc

SEQ ID NO: 300927 - DNA, 25 bp, probe
ttccagacatgagcttgagcaggca

SEQ ID NO: 300928 - DNA, 25 bp, probe
ttccatacagccttggactagcaat

SEQ ID NO: 300929 - DNA, 25 bp, probe
ttcctcaaccataaaatgaagataa

SEQ ID NO: 300930 - DNA, 25 bp, probe
ttcctcatacaagtaaacacagaaa

SEQ ID NO: 300931 - DNA, 25 bp, probe
ttccctgacgagagtatctgaatca

SEQ ID NO: 300932 - DNA, 25 bp, probe
ttccctgacgagagtatctgaatca

SEQ ID NO: 300933 - DNA, 25 bp, probe
ttcccgtctgagccagtactgaata

SEQ ID NO: 300934 - DNA, 25 bp, probe
ttcccttcatgatagtattcttact

SEQ ID NO: 300935 - DNA, 25 bp, probe
ttcccttcatgatagtattcttact

SEQ ID NO: 300936 - DNA, 25 bp, probe
ttgcccattagatatgatcaaccta

SEQ ID NO: 300937 - DNA, 25 bp, probe
ttgccgacagagcactgatcaacag

SEQ ID NO: 300938 - DNA, 25 bp, probe
ttgcctaaggtgactcaaacagcca

SEQ ID NO: 300939 - DNA, 25 bp, probe
ttgcctaaggtgactcaaacagcca

SEQ ID NO: 300940 - DNA, 25 bp, probe
ttcctaagcctggctgcaaagaaga

SEQ ID NO: 300941 - DNA, 25 bp, probe
ttcgctggatgcctcctgaaagcat

SEQ ID NO: 300942 - DNA, 25 bp, probe
ttcgctggatgcctcctgaaagcat

SEQ ID NO: 300943 - DNA, 25 bp, probe
ttcgctggatgcctcctgaaagcat

SEQ ID NO: 300944 - DNA, 25 bp, probe
ttcgggctggctagggacatcatga

SEQ ID NO: 300945 - DNA, 25 bp, probe
ttgcgggcgctctagaggataacaa

SEQ ID NO: 300946 - DNA, 25 bp, probe
ttcgaggcgtgcgagtggactaaca

SEQ ID NO: 300947 - DNA, 25 bp, probe
ttggagggggagctgaccatcatcg

SEQ ID NO: 300948 - DNA, 25 bp, probe
ttccaaggaggaggcgggcatcatc

SEQ ID NO: 300949 - DNA, 25 bp, probe
ttgcgcgaggagctcatggggactc

SEQ ID NO: 300950 - DNA, 25 bp, probe
ttccgggagcggatgtggatgctgc

SEQ ID NO: 300951 - DNA, 25 bp, probe
ttccggaagcggatggtctgggaga

SEQ ID NO: 300952 - DNA, 25 bp, probe
ttccccaaagtgaggctcatggtgg

SEQ ID NO: 300953 - DNA, 25 bp, probe
ttccccaagaggatggccatgggtg

SEQ ID NO: 300954 - DNA, 25 bp, probe
ttcctccagaagtcttcaccagggt

SEQ ID NO: 300955 - DNA, 25 bp, probe
ttcctctcagatttcatcatccgag

SEQ ID NO: 300956 - DNA, 25 bp, probe
ttgccccagagatccttcaggagat

SEQ ID NO: 300957 - DNA, 25 bp, probe
ttgccccagagatccttcaggagat

SEQ ID NO: 300958 - DNA, 25 bp, probe
ttccctcagatttccattgtgtggc

SEQ ID NO: 300959 - DNA, 25 bp, probe
ttcccatctgtgattccttgtgtgc

SEQ ID NO: 300960 - DNA, 25 bp, probe
ttccccatgagggtccaatgtgtga

SEQ ID NO: 300961 - DNA, 25 bp, probe
ttccctctcagattgtaccattgag

SEQ ID NO: 300962 - DNA, 25 bp, probe
ttggcgtcatactctaccatatggt

SEQ ID NO: 300963 - DNA, 25 bp, probe
ttgagcgtccaaaaaccctgagtgt

SEQ ID NO: 300964 - DNA, 25 bp, probe
ttcctgtggaatcagacctccagga

SEQ ID NO: 300965 - DNA, 25 bp, probe
ttgccaaaatgtcagagtcccagga

SEQ ID NO: 300966 - DNA, 25 bp, probe
ttgccaatagtttcatcttccgagg

SEQ ID NO: 300967 - DNA, 25 bp, probe
ttgccaatagtttcatcttccgagg

SEQ ID NO: 300968 - DNA, 25 bp, probe
ttcctttgtgtactctatactggag

SEQ ID NO: 300969 - DNA, 25 bp, probe
ttcctttggtaactgccattgaaat

SEQ ID NO: 300970 - DNA, 25 bp, probe
ttcctgttgggcaatgctccttgac

SEQ ID NO: 300971 - DNA, 25 bp, probe
ttccgtgatggaaaccacttcctct

SEQ ID NO: 300972 - DNA, 25 bp, probe
ttcgcgatggacagactcacaacct

SEQ ID NO: 300973 - DNA, 25 bp, probe
ttcgcgatggacagactcacaacct

SEQ ID NO: 300974 - DNA, 25 bp, probe
ttcctgagaggcaggtcttccgtcc

SEQ ID NO: 300975 - DNA, 25 bp, probe
ttcctgagggctagatgcatttttt

SEQ ID NO: 300976 - DNA, 25 bp, probe
ttcgagtgggtggagctcttgcttt

SEQ ID NO: 300977 - DNA, 25 bp, probe
ttcgagggtgaggacttctctggag

SEQ ID NO: 300978 - DNA, 25 bp, probe
ttggacggtgtggaacttggagagc

SEQ ID NO: 300979 - DNA, 25 bp, probe
ttggagcagggggaattgataaagg

SEQ ID NO: 300980 - DNA, 25 bp, probe
ttgggagggactttgtggagacagg

SEQ ID NO: 300981 - DNA, 25 bp, probe
ttgggagggactttgtggagacagg

SEQ ID NO: 300982 - DNA, 25 bp, probe
ttggcctgggcctggtagagccagg

SEQ ID NO: 300983 - DNA, 25 bp, probe
ttggccactatgcgggtagactacg

SEQ ID NO: 300984 - DNA, 25 bp, probe
ttcgccacgctgcgggagaagctgc

SEQ ID NO: 300985 - DNA, 25 bp, probe
ttcctcacagggtggagatcagatt

SEQ ID NO: 300986 - DNA, 25 bp, probe
ttcctgccaggggaggtgaagaccc

SEQ ID NO: 300987 - DNA, 25 bp, probe
ttcctgcgggtggggagactgagcc

SEQ ID NO: 300988 - DNA, 25 bp, probe
ttccgcgtggtggctggagaccata

SEQ ID NO: 300989 - DNA, 25 bp, probe
ttcccgatctgggctggagagcttc

SEQ ID NO: 300990 - DNA, 25 bp, probe
ttcccattccaggggatgagctacc

SEQ ID NO: 300991 - DNA, 25 bp, probe
ttcccactgccaggggttcttgagc

SEQ ID NO: 300992 - DNA, 25 bp, probe
ttcccactgccattggggtcagcat

SEQ ID NO: 300993 - DNA, 25 bp, probe
ttcccatgggcattgcaagtgccac

SEQ ID NO: 300994 - DNA, 25 bp, probe
ttccacatgtcctgcacagtcaaca

SEQ ID NO: 300995 - DNA, 25 bp, probe
ttccctgtttgagcaatgcagtgcc

SEQ ID NO: 300996 - DNA, 25 bp, probe
ttccctttgctaacaatgagtattt

SEQ ID NO: 300997 - DNA, 25 bp, probe
ttccccttctgtgtcacagttcttg

SEQ ID NO: 300998 - DNA, 25 bp, probe
ttcctccttttgtccacaggtatga

SEQ ID NO: 300999 - DNA, 25 bp, probe
ttcctccttcatttctctcaaggga

SEQ ID NO: 301000 - DNA, 25 bp, probe
ttcctccttcatttctctcaaggga

SEQ ID NO: 301001 - DNA, 25 bp, probe
ttccttctctcacctttaaatggca

SEQ ID NO: 301002 - DNA, 25 bp, probe
ttcctgtgtcacggtgttatcaatc

SEQ ID NO: 301003 - DNA, 25 bp, probe
ttccactgaactgtgcggatgccac

SEQ ID NO: 301004 - DNA, 25 bp, probe
ttccaagaagctttccagctccagc

SEQ ID NO: 301005 - DNA, 25 bp, probe
ttccaggagttctgaagctgacagc

SEQ ID NO: 301006 - DNA, 25 bp, probe
ttccttctgtcctgaacacatagcc

SEQ ID NO: 301007 - DNA, 25 bp, probe
ttccttgtgccttatcaaacaggac

SEQ ID NO: 301008 - DNA, 25 bp, probe
ttcctgtggcctgaagaagcacttc

SEQ ID NO: 301009 - DNA, 25 bp, probe
ttcctggtcttatcatggacaattt

SEQ ID NO: 301010 - DNA, 25 bp, probe
ttccaggtcctcagatgggaattgc

SEQ ID NO: 301011 - DNA, 25 bp, probe
ttcctattactcatgggtgtatacg

SEQ ID NO: 301012 - DNA, 25 bp, probe
ttccagaaacatatgggctgataaa

SEQ ID NO: 301013 - DNA, 25 bp, probe
ttccgaactcgcatggttatgaata

SEQ ID NO: 301014 - DNA, 25 bp, probe
ttccagagagccattggtccagaag

SEQ ID NO: 301015 - DNA, 25 bp, probe
ttccaggaccgttcacatacaaaga

SEQ ID NO: 301016 - DNA, 25 bp, probe
ttgccatcatgatcgtgacctacac

SEQ ID NO: 301017 - DNA, 25 bp, probe
ttcgcatcagtggcgatgactttat

SEQ ID NO: 301018 - DNA, 25 bp, probe
ttcctgcaggtgcatgactttttcc

SEQ ID NO: 301019 - DNA, 25 bp, probe
ttcctatcctgtggactggtttgcc

SEQ ID NO: 301020 - DNA, 25 bp, probe
ttcctatcctgtggactggtttgcc

SEQ ID NO: 301021 - DNA, 25 bp, probe
ttccttcctatacattgtttacact

SEQ ID NO: 301022 - DNA, 25 bp, probe
ttccttccaatgagagattataaca

SEQ ID NO: 301023 - DNA, 25 bp, probe
ttccttcccaaactgttcaagaaat

SEQ ID NO: 301024 - DNA, 25 bp, probe
ttcctcatcccagaatgtgtcactg

SEQ ID NO: 301025 - DNA, 25 bp, probe
ttcctcctggcagaatgctagctct

SEQ ID NO: 301026 - DNA, 25 bp, probe
ttcctcctggcagaatgctagctct

SEQ ID NO: 301027 - DNA, 25 bp, probe
ttcctcgtggcagaggcctgcatgt

SEQ ID NO: 301028 - DNA, 25 bp, probe
ttcccgtggagttgtccatcgtgac

SEQ ID NO: 301029 - DNA, 25 bp, probe
ttcccagaggagatggccacgtacc

SEQ ID NO: 301030 - DNA, 25 bp, probe
ttcccatggaacatagccacatcta

SEQ ID NO: 301031 - DNA, 25 bp, probe
ttcctgctgtgattcttcgaaatct

SEQ ID NO: 301032 - DNA, 25 bp, probe
ttgactgtgagaactcatcgaaact

SEQ ID NO: 301033 - DNA, 25 bp, probe
ttgacattgagaaccctgaaacccc

SEQ ID NO: 301034 - DNA, 25 bp, probe
ttggcaccaaacgctatatgcctcc

SEQ ID NO: 301035 - DNA, 25 bp, probe
ttgcaagaaaaccactatcaccctt

SEQ ID NO: 301036 - DNA, 25 bp, probe
ttgcaagaaaaccactatcaccctt

SEQ ID NO: 301037 - DNA, 25 bp, probe
ttgcaagaaatttctcttcaagcat

SEQ ID NO: 301038 - DNA, 25 bp, probe
ttgccatgtagaccccttgaagagg

SEQ ID NO: 301039 - DNA, 25 bp, probe
ttgccagtcactccgttttgcaaaa

SEQ ID NO: 301040 - DNA, 25 bp, probe
ttgacctacttgctggggtacagtt

SEQ ID NO: 301041 - DNA, 25 bp, probe
ttgaaccacattctggggaagacta

SEQ ID NO: 301042 - DNA, 25 bp, probe
ttgaaaactgcggtggaggaagttt

SEQ ID NO: 301043 - DNA, 25 bp, probe
ttgaaaatcgggcccggaattcagt

SEQ ID NO: 301044 - DNA, 25 bp, probe
ttgccattttggtcaggctggaatt

SEQ ID NO: 301045 - DNA, 25 bp, probe
ttgctcaattttccggaaatatcct

SEQ ID NO: 301046 - DNA, 25 bp, probe
ttgcctgaattacgagcagaaagat

SEQ ID NO: 301047 - DNA, 25 bp, probe
ttgccgaaatagtagcagctttgag

SEQ ID NO: 301048 - DNA, 25 bp, probe
ttccgatactagtttgctttgctga

SEQ ID NO: 301049 - DNA, 25 bp, probe
ttccaatacgattttctgttgcacc

SEQ ID NO: 301050 - DNA, 25 bp, probe
ttccaagccgactttcatgagctgc

SEQ ID NO: 301051 - DNA, 25 bp, probe
ttcctatgttgaatcccatgatcta

SEQ ID NO: 301052 - DNA, 25 bp, probe
ttccttgtttcttcacaattttatt

SEQ ID NO: 301053 - DNA, 25 bp, probe
ttccatttgtaatcaagttatacat

SEQ ID NO: 301054 - DNA, 25 bp, probe
ttccagtatgaaaagctatcttaaa

SEQ ID NO: 301055 - DNA, 25 bp, probe
ttccatgtggtaactgattttaatg

SEQ ID NO: 301056 - DNA, 25 bp, probe
ttccatgtggtaactgattttaatg

SEQ ID NO: 301057 - DNA, 25 bp, probe
ttcctgtgatgagcctgattttcca

SEQ ID NO: 301058 - DNA, 25 bp, probe
ttccgtggaccaattcatctttcag

SEQ ID NO: 301059 - DNA, 25 bp, probe
ttcctgatggaaatatttcctccat

SEQ ID NO: 301060 - DNA, 25 bp, probe
ttcctctgtaaaagtgtcacaccac

SEQ ID NO: 301061 - DNA, 25 bp, probe
ttcccgttgcgcagttgaggacacc

SEQ ID NO: 301062 - DNA, 25 bp, probe
ttccctcttggcagctaatgggctc

SEQ ID NO: 301063 - DNA, 25 bp, probe
ttcccctgcaggatgtttggcgcat

SEQ ID NO: 301064 - DNA, 25 bp, probe
ttccttctgagtttgctgttggtgc

SEQ ID NO: 301065 - DNA, 25 bp, probe
ttcctcactggtgttttggataact

SEQ ID NO: 301066 - DNA, 25 bp, probe
ttcctcaccatccttttgttgaaat

SEQ ID NO: 301067 - DNA, 25 bp, probe
ttcctaatcatcccaatgttgtaaa

SEQ ID NO: 301068 - DNA, 25 bp, probe
ttcctcttatcaacaacttgtgaca

SEQ ID NO: 301069 - DNA, 25 bp, probe
ttgcctcttctaaaagctactgagc

SEQ ID NO: 301070 - DNA, 25 bp, probe
ttccataactccagacatcactggc

SEQ ID NO: 301071 - DNA, 25 bp, probe
ttccataactccagacatcactggc

SEQ ID NO: 301072 - DNA, 25 bp, probe
ttccgcaaccaggagatccagcgcg

SEQ ID NO: 301073 - DNA, 25 bp, probe
ttcctgcaaacggagacctcggtca

SEQ ID NO: 301074 - DNA, 25 bp, probe
ttcctgcaaacggagacctcggtca

SEQ ID NO: 301075 - DNA, 25 bp, probe
ttccatcaagactgtgcacccaggc

SEQ ID NO: 301076 - DNA, 25 bp, probe
ttccatcaagactgtgcacccaggc

SEQ ID NO: 301077 - DNA, 25 bp, probe
ttcccgatgaacgtgcacctgcggg

SEQ ID NO: 301078 - DNA, 25 bp, probe
ttcccgatgaacgtgcacctgcggg

SEQ ID NO: 301079 - DNA, 25 bp, probe
ttcccgagaggcgtgatgcaggggt

SEQ ID NO: 301080 - DNA, 25 bp, probe
ttcccaggcaggatgagctggggtt

SEQ ID NO: 301081 - DNA, 25 bp, probe
ttgccctatgcactgttagcatgag

SEQ ID NO: 301082 - DNA, 25 bp, probe
ttcccttcttgtagagagatggaca

SEQ ID NO: 301083 - DNA, 25 bp, probe
ttccacttcttgatatgactgagat

SEQ ID NO: 301084 - DNA, 25 bp, probe
ttccgtctctggtgtagctgatgat

SEQ ID NO: 301085 - DNA, 25 bp, probe
ttccctcttctgtgatagctgtagt

SEQ ID NO: 301086 - DNA, 25 bp, probe
ttccctcttctgtgatagctgtagt

SEQ ID NO: 301087 - DNA, 25 bp, probe
ttccaccttgcctgagactggcatt

SEQ ID NO: 301088 - DNA, 25 bp, probe
ttccagcctgactttgatcatcagg

SEQ ID NO: 301089 - DNA, 25 bp, probe
ttccacacgtcaatcttccagatga

SEQ ID NO: 301090 - DNA, 25 bp, probe
ttccacagattctacttcgagaacc

SEQ ID NO: 301091 - DNA, 25 bp, probe
ttccaaggtgcatcgacattaaccc

SEQ ID NO: 301092 - DNA, 25 bp, probe
ttccaatgtccaaaactgctaaccc

SEQ ID NO: 301093 - DNA, 25 bp, probe
ttccatatgtccaaattctggcttc

SEQ ID NO: 301094 - DNA, 25 bp, probe
ttccatggcaccaaacgctggtcac

SEQ ID NO: 301095 - DNA, 25 bp, probe
ttgccatggtaatcctgctcagtac

SEQ ID NO: 301096 - DNA, 25 bp, probe
ttgccagtgccaacagcgtgctgga

SEQ ID NO: 301097 - DNA, 25 bp, probe
ttgccagtgccaacagcgtgctgga

SEQ ID NO: 301098 - DNA, 25 bp, probe
ttccctcaccaacttgctggttatc

SEQ ID NO: 301099 - DNA, 25 bp, probe
ttccaccaaaaactgggtgttcaag

SEQ ID NO: 301100 - DNA, 25 bp, probe
ttgcttccaaacagctgggtttaaa

SEQ ID NO: 301101 - DNA, 25 bp, probe
ttgttcctaatgacgtggactttag

SEQ ID NO: 301102 - DNA, 25 bp, probe
ttgttgcctgttgaggagccaatta

SEQ ID NO: 301103 - DNA, 25 bp, probe
ttgctacctgttcattatcatcaag

SEQ ID NO: 301104 - DNA, 25 bp, probe
ttgctgacctgtgcgattgctgtag

SEQ ID NO: 301105 - DNA, 25 bp, probe
ttgtaagatgacagatgatgctgtc

SEQ ID NO: 301106 - DNA, 25 bp, probe
ttgaagatgatggcaggaaggtctc

SEQ ID NO: 301107 - DNA, 25 bp, probe
ttgcgaactggccgcgaggatgctc

SEQ ID NO: 301108 - DNA, 25 bp, probe
ttgcgaactggccgcgaggatgctc

SEQ ID NO: 301109 - DNA, 25 bp, probe
ttccaatccagggcgggatcctgaa

SEQ ID NO: 301110 - DNA, 25 bp, probe
ttccagaccgcggcctaataatgag

SEQ ID NO: 301111 - DNA, 25 bp, probe
ttgcccttccatgactaataaggaa

SEQ ID NO: 301112 - DNA, 25 bp, probe
ttgcccttccatgactaataaggaa

SEQ ID NO: 301113 - DNA, 25 bp, probe
ttccctctgccacagttatcaagaa

SEQ ID NO: 301114 - DNA, 25 bp, probe
ttgcccgcatctatagtttccagat

SEQ ID NO: 301115 - DNA, 25 bp, probe
ttccccatcctgtgttgatgatata

SEQ ID NO: 301116 - DNA, 25 bp, probe
ttcccaagaaatagttgatgaattt

SEQ ID NO: 301117 - DNA, 25 bp, probe
ttccactcagaacctctctggaatt

SEQ ID NO: 301118 - DNA, 25 bp, probe
ttgccactagggctcttgtgttttt

SEQ ID NO: 301119 - DNA, 25 bp, probe
ttgccactagggctcttgtgttttt

SEQ ID NO: 301120 - DNA, 25 bp, probe
ttgaatttggcacctcggagacttt

SEQ ID NO: 301121 - DNA, 25 bp, probe
ttgcaatttaacaccagagttttgt

SEQ ID NO: 301122 - DNA, 25 bp, probe
ttgtcattgatataaacctgtttgg

SEQ ID NO: 301123 - DNA, 25 bp, probe
ttgtcctggttattgtcggtatcgg

SEQ ID NO: 301124 - DNA, 25 bp, probe
ttgtcctccttggtaccgtatcaag

SEQ ID NO: 301125 - DNA, 25 bp, probe
ttccagacctatgtcaccagtacca

SEQ ID NO: 301126 - DNA, 25 bp, probe
ttccaaactcttaaccagttctcca

SEQ ID NO: 301127 - DNA, 25 bp, probe
ttcctacaagttaaccagttgcact

SEQ ID NO: 301128 - DNA, 25 bp, probe
ttccataaggtgatacaggcctgcc

SEQ ID NO: 301129 - DNA, 25 bp, probe
ttgcaaccaggtggtatcaggcccc

SEQ ID NO: 301130 - DNA, 25 bp, probe
ttgactgcacaggtaatacaacacg

SEQ ID NO: 301131 - DNA, 25 bp, probe
ttgacggagcttgataccatcctgt

SEQ ID NO: 301132 - DNA, 25 bp, probe
ttgagttggctttgctacccattta

SEQ ID NO: 301133 - DNA, 25 bp, probe
ttgacttggagctcttcgtaaataa

SEQ ID NO: 301134 - DNA, 25 bp, probe
ttgccttgggttattatggaatgat

SEQ ID NO: 301135 - DNA, 25 bp, probe
ttgcacttgtgcctgttttaaatta

SEQ ID NO: 301136 - DNA, 25 bp, probe
ttcctctatgccatctttaccaaaa

SEQ ID NO: 301137 - DNA, 25 bp, probe
ttcctactccaacgtatcaccaaaa

SEQ ID NO: 301138 - DNA, 25 bp, probe
ttgcttattccagtctgaaaccaaa

SEQ ID NO: 301139 - DNA, 25 bp, probe
ttgcataatccctttaacaagccta

SEQ ID NO: 301140 - DNA, 25 bp, probe
ttgaaacatatctcttatcttacga

SEQ ID NO: 301141 - DNA, 25 bp, probe
ttgtcaattactaccctttcacaag

SEQ ID NO: 301142 - DNA, 25 bp, probe
ttgatttaaccaccctgattcatcc

SEQ ID NO: 301143 - DNA, 25 bp, probe
ttgttgccatcaatgaccccttcat

SEQ ID NO: 301144 - DNA, 25 bp, probe
ttgtctgcactgttcaaacctctgc

SEQ ID NO: 301145 - DNA, 25 bp, probe
ttcctcctaatcaacaactcagcac

SEQ ID NO: 301146 - DNA, 25 bp, probe
ttcctcatcaaaaccaagtcgcagc

SEQ ID NO: 301147 - DNA, 25 bp, probe
ttcctcatcaaaaccaagtcgcagc

SEQ ID NO: 301148 - DNA, 25 bp, probe
ttgccatctcaatgacaaactagcc

SEQ ID NO: 301149 - DNA, 25 bp, probe
ttgccagtcagttgctcaaaaggtc

SEQ ID NO: 301150 - DNA, 25 bp, probe
ttgctcaatagattgctcaaatcag

SEQ ID NO: 301151 - DNA, 25 bp, probe
ttgctatcagaactgctaaaggaga

SEQ ID NO: 301152 - DNA, 25 bp, probe
ttgctctcagaaccttggggaaggt

SEQ ID NO: 301153 - DNA, 25 bp, probe
ttgcttcagtcatcctgaacctgag

SEQ ID NO: 301154 - DNA, 25 bp, probe
ttccatagtacaccttagcgctgag

SEQ ID NO: 301155 - DNA, 25 bp, probe
ttcctagctaaccctagatatggca

SEQ ID NO: 301156 - DNA, 25 bp, probe
ttcctatctggaatgactagaggga

SEQ ID NO: 301157 - DNA, 25 bp, probe
ttcctcaaggagcagctgggggcag

SEQ ID NO: 301158 - DNA, 25 bp, probe
ttccaaaggcagcgtgccgagccag

SEQ ID NO: 301159 - DNA, 25 bp, probe
ttccattcagtctggatccttccat

SEQ ID NO: 301160 - DNA, 25 bp, probe
ttcctgtgcgactggatcttgctaa

SEQ ID NO: 301161 - DNA, 25 bp, probe
ttccttcacatcctgtgtttctagg

SEQ ID NO: 301162 - DNA, 25 bp, probe
ttccatagcaacccatgtttcctgg

SEQ ID NO: 301163 - DNA, 25 bp, probe
ttccatagcaacccatgtttcctgg

SEQ ID NO: 301164 - DNA, 25 bp, probe
ttccaataactgaagtatccacttt

SEQ ID NO: 301165 - DNA, 25 bp, probe
ttgactggaccgagtgactactata

SEQ ID NO: 301166 - DNA, 25 bp, probe
ttgactgtgatctggagtccttctt

SEQ ID NO: 301167 - DNA, 25 bp, probe
ttccatttctggaagtgactttggc

SEQ ID NO: 301168 - DNA, 25 bp, probe
ttccatattgctatagtacttctgt

SEQ ID NO: 301169 - DNA, 25 bp, probe
ttcctttctacttttctttggcact

SEQ ID NO: 301170 - DNA, 25 bp, probe
ttcctttctacttttctttggcact

SEQ ID NO: 301171 - DNA, 25 bp, probe
ttcctgttttttgtctatgtcccag

SEQ ID NO: 301172 - DNA, 25 bp, probe
ttccttttttatgcttagaacacca

SEQ ID NO: 301173 - DNA, 25 bp, probe
ttcctttttctgtccttcagggact

SEQ ID NO: 301174 - DNA, 25 bp, probe
ttcctgttttgcgcattgtcatggg

SEQ ID NO: 301175 - DNA, 25 bp, probe
ttcctggatctgagaatttattgga

SEQ ID NO: 301176 - DNA, 25 bp, probe
ttccagccactgagaatttgaacgc

SEQ ID NO: 301177 - DNA, 25 bp, probe
ttgacattccggaaatttggatcga

SEQ ID NO: 301178 - DNA, 25 bp, probe
ttgaatcccggaagcgacttgccaa

SEQ ID NO: 301179 - DNA, 25 bp, probe
ttgaatcccggaagcgacttgccaa

SEQ ID NO: 301180 - DNA, 25 bp, probe
ttgtaaactggatcgactctatcat

SEQ ID NO: 301181 - DNA, 25 bp, probe
ttgtaaactggatcgactctatcat

SEQ ID NO: 301182 - DNA, 25 bp, probe
ttgatccaaaggacctgaccttctt

SEQ ID NO: 301183 - DNA, 25 bp, probe
ttgcatccaagacttatcagtcttt

SEQ ID NO: 301184 - DNA, 25 bp, probe
ttgtcttgaggcttccaggttttgt

SEQ ID NO: 301185 - DNA, 25 bp, probe
ttcctggaccttggggtctcttgat

SEQ ID NO: 301186 - DNA, 25 bp, probe
ttccagagacctgggggtgtgtctg

SEQ ID NO: 301187 - DNA, 25 bp, probe
ttccatgacacccaagggtcgccta

SEQ ID NO: 301188 - DNA, 25 bp, probe
ttgtgtgacaccagtgggtcacttc

SEQ ID NO: 301189 - DNA, 25 bp, probe
ttcctgaccctactgtagtcactac

SEQ ID NO: 301190 - DNA, 25 bp, probe
ttccatcccatcatcttggtactac

SEQ ID NO: 301191 - DNA, 25 bp, probe
ttcccattgctcatcatgggtatta

SEQ ID NO: 301192 - DNA, 25 bp, probe
ttccaaatgcccaaggatgccttag

SEQ ID NO: 301193 - DNA, 25 bp, probe
ttccaactccacagagtgaccagag

SEQ ID NO: 301194 - DNA, 25 bp, probe
ttgccaacttacatcagaaaagcag

SEQ ID NO: 301195 - DNA, 25 bp, probe
ttgccaattttttcatgaatgtaag

SEQ ID NO: 301196 - DNA, 25 bp, probe
ttgctgcatttctcccaagtgtaaa

SEQ ID NO: 301197 - DNA, 25 bp, probe
ttgctctttagaacccagtgaaaaa

SEQ ID NO: 301198 - DNA, 25 bp, probe
ttgttcttcagcatccgacgggaac

SEQ ID NO: 301199 - DNA, 25 bp, probe
ttgttcttcagcatccgacgggaac

SEQ ID NO: 301200 - DNA, 25 bp, probe
ttggattgtcaaaaatggagggcaa

SEQ ID NO: 301201 - DNA, 25 bp, probe
ttgtgatttccaagaactacgtgaa

SEQ ID NO: 301202 - DNA, 25 bp, probe
ttggatgcctgtaaggatcccggga

SEQ ID NO: 301203 - DNA, 25 bp, probe
ttgcgcatctttaagctgacccgcc

SEQ ID NO: 301204 - DNA, 25 bp, probe
ttgcgcatctttaagctgacccgcc

SEQ ID NO: 301205 - DNA, 25 bp, probe
ttgcacatgactaagacggacccct

SEQ ID NO: 301206 - DNA, 25 bp, probe
ttcctattattctggatcctcgtgg

SEQ ID NO: 301207 - DNA, 25 bp, probe
ttcctactagactgagcatcccgaa

SEQ ID NO: 301208 - DNA, 25 bp, probe
ttcctactagactgagcatcccgaa

SEQ ID NO: 301209 - DNA, 25 bp, probe
ttccaagtagtaaagctccctgctc

SEQ ID NO: 301210 - DNA, 25 bp, probe
ttgccaagtactacagagacctggc

SEQ ID NO: 301211 - DNA, 25 bp, probe
ttgccacaaacactgcagagaccag

SEQ ID NO: 301212 - DNA, 25 bp, probe
ttgcccaaaatgcagtgccaagttg

SEQ ID NO: 301213 - DNA, 25 bp, probe
ttcccataaatggactctcagatgt

SEQ ID NO: 301214 - DNA, 25 bp, probe
ttcctcataaaacctgcagcagcat

SEQ ID NO: 301215 - DNA, 25 bp, probe
ttccaatgccaattcatctcagcaa

SEQ ID NO: 301216 - DNA, 25 bp, probe
ttccatgatgcacagtatctgctgt

SEQ ID NO: 301217 - DNA, 25 bp, probe
ttccggcagatcgtctctgcttgtg

SEQ ID NO: 301218 - DNA, 25 bp, probe
ttccaggagagcaactccttgcgcc

SEQ ID NO: 301219 - DNA, 25 bp, probe
ttccaggaggaccactctctgtggc

SEQ ID NO: 301220 - DNA, 25 bp, probe
ttcctgaataaccacatcctggtga

SEQ ID NO: 301221 - DNA, 25 bp, probe
ttgctttgctgaccaaatgcctggt

SEQ ID NO: 301222 - DNA, 25 bp, probe
ttgctttccgtgaaatgctcagaaa

SEQ ID NO: 301223 - DNA, 25 bp, probe
ttgctgttcttgcatggttcaaacc

SEQ ID NO: 301224 - DNA, 25 bp, probe
ttccttatcatgctgggtacaatgc

SEQ ID NO: 301225 - DNA, 25 bp, probe
ttccatcttcagctctcagaaattg

SEQ ID NO: 301226 - DNA, 25 bp, probe
ttcctgtggctctttctgatagtgt

SEQ ID NO: 301227 - DNA, 25 bp, probe
ttccatgactgctttactgattttt

SEQ ID NO: 301228 - DNA, 25 bp, probe
ttccatggtcctcactgattgtttt

SEQ ID NO: 301229 - DNA, 25 bp, probe
ttccatggtcctcactgattgtttt

SEQ ID NO: 301230 - DNA, 25 bp, probe
ttgcctgttgccaaactggtggttt

SEQ ID NO: 301231 - DNA, 25 bp, probe
ttgcctgttgccaaactggtggttt

SEQ ID NO: 301232 - DNA, 25 bp, probe
ttcctttgctgttgactggtggtcc

SEQ ID NO: 301233 - DNA, 25 bp, probe
ttccttgtctctgaatgactctgtc

SEQ ID NO: 301234 - DNA, 25 bp, probe
ttccttgccttggttgatttggttt

SEQ ID NO: 301235 - DNA, 25 bp, probe
ttcctgtccctagtaatcattcgtt

SEQ ID NO: 301236 - DNA, 25 bp, probe
ttcctgatgtccagtaacattcgca

SEQ ID NO: 301237 - DNA, 25 bp, probe
ttcctgatgtccagtaacattcgca

SEQ ID NO: 301238 - DNA, 25 bp, probe
ttccaatgtcaatgtgaacgtccac

SEQ ID NO: 301239 - DNA, 25 bp, probe
ttccatttgcagtgtgcaacagaaa

SEQ ID NO: 301240 - DNA, 25 bp, probe
ttccatttggcagagagacaagaga

SEQ ID NO: 301241 - DNA, 25 bp, probe
ttccattctgtggcaccaacaaggt

SEQ ID NO: 301242 - DNA, 25 bp, probe
ttccagtctgtggagtccccagaga

SEQ ID NO: 301243 - DNA, 25 bp, probe
ttccaatgatggcagtcatctccat

SEQ ID NO: 301244 - DNA, 25 bp, probe
ttgtctcagcatcagtatatcccat

SEQ ID NO: 301245 - DNA, 25 bp, probe
ttgtctcagcatcagtatatcccat

SEQ ID NO: 301246 - DNA, 25 bp, probe
ttgcctcaatgccagtaacgcgtct

SEQ ID NO: 301247 - DNA, 25 bp, probe
ttgcctcaatgccagtaacgcgtct

SEQ ID NO: 301248 - DNA, 25 bp, probe
ttcctgaatgcaccataatcgctgt

SEQ ID NO: 301249 - DNA, 25 bp, probe
ttccacaaggccattgctgctgtaa

SEQ ID NO: 301250 - DNA, 25 bp, probe
ttcctgacacgcatctttgcttaca

SEQ ID NO: 301251 - DNA, 25 bp, probe
ttcctaatcgatcgcttctctttga

SEQ ID NO: 301252 - DNA, 25 bp, probe
ttcctaatcgatcgcttctctttga

SEQ ID NO: 301253 - DNA, 25 bp, probe
ttgcacttattaaccgtctgttgaa

SEQ ID NO: 301254 - DNA, 25 bp, probe
ttgattctgagagtacaggtcagta

SEQ ID NO: 301255 - DNA, 25 bp, probe
ttgcttctggaaacaggacagccgg

SEQ ID NO: 301256 - DNA, 25 bp, probe
ttgctactatgagaacagccccggg

SEQ ID NO: 301257 - DNA, 25 bp, probe
ttgcaaccatggtaacgtttctggc

SEQ ID NO: 301258 - DNA, 25 bp, probe
ttgctcaacaggtgaccttacaggc

SEQ ID NO: 301259 - DNA, 25 bp, probe
ttgctaaagagaggcaccattccag

SEQ ID NO: 301260 - DNA, 25 bp, probe
ttgcaaaaggtggcccttcactgtc

SEQ ID NO: 301261 - DNA, 25 bp, probe
ttgccgagaggtgtccattctctgc

SEQ ID NO: 301262 - DNA, 25 bp, probe
ttccaagtgcttatccaactctgaa

SEQ ID NO: 301263 - DNA, 25 bp, probe
ttccaagtgcttatccaactctgaa

SEQ ID NO: 301264 - DNA, 25 bp, probe
ttccctatcaaaaccagcctgtaaa

SEQ ID NO: 301265 - DNA, 25 bp, probe
ttgccccaaacaaacctagctaact

SEQ ID NO: 301266 - DNA, 25 bp, probe
ttgaccgccaacatatccgagctaa

SEQ ID NO: 301267 - DNA, 25 bp, probe
ttgaacccaattctctatactctga

SEQ ID NO: 301268 - DNA, 25 bp, probe
ttgaacccaattctctatactctga

SEQ ID NO: 301269 - DNA, 25 bp, probe
ttgtcacccaagaactcttaccatg

SEQ ID NO: 301270 - DNA, 25 bp, probe
ttgtcacctacaccattttaggcat

SEQ ID NO: 301271 - DNA, 25 bp, probe
ttgctcccaatccctatttgagaaa

SEQ ID NO: 301272 - DNA, 25 bp, probe
ttgcttggcaacacgacttgaaata

SEQ ID NO: 301273 - DNA, 25 bp, probe
ttgcttggcaacacgacttgaaata

SEQ ID NO: 301274 - DNA, 25 bp, probe
ttccaccaacatccagaccaaaaag

SEQ ID NO: 301275 - DNA, 25 bp, probe
ttccaccaacatccagaccaaaaag

SEQ ID NO: 301276 - DNA, 25 bp, probe
ttccaccaagatccaggacaccaaa

SEQ ID NO: 301277 - DNA, 25 bp, probe
ttccacttaaacgtgtcccatgaat

SEQ ID NO: 301278 - DNA, 25 bp, probe
ttccacccacagggtgccgctagaa

SEQ ID NO: 301279 - DNA, 25 bp, probe
ttccagccacccctgatggagtgga

SEQ ID NO: 301280 - DNA, 25 bp, probe
ttccatcctgccggatgagtgtggg

SEQ ID NO: 301281 - DNA, 25 bp, probe
ttccatcctcctgcacaaggtgcag

SEQ ID NO: 301282 - DNA, 25 bp, probe
ttccatcctcctgcacaaggtgcag

SEQ ID NO: 301283 - DNA, 25 bp, probe
ttccatttcttccacgatggtgcag

SEQ ID NO: 301284 - DNA, 25 bp, probe
ttccaaactctatcggctgatgcag

SEQ ID NO: 301285 - DNA, 25 bp, probe
ttccattacctgcagctggtggcaa

SEQ ID NO: 301286 - DNA, 25 bp, probe
ttgccttacgctcgtgagcgtgaga

SEQ ID NO: 301287 - DNA, 25 bp, probe
ttcctctgccttcggagggaaattg

SEQ ID NO: 301288 - DNA, 25 bp, probe
ttccttcttattgactgggagactg

SEQ ID NO: 301289 - DNA, 25 bp, probe
ttgcctgcacttactggtcggaaga

SEQ ID NO: 301290 - DNA, 25 bp, probe
ttgcctgcacttactggtcggaaga

SEQ ID NO: 301291 - DNA, 25 bp, probe
ttgcctgcattaccggtcgatgcaa

SEQ ID NO: 301292 - DNA, 25 bp, probe
ttgatggttagcgaggccgtgcagg

SEQ ID NO: 301293 - DNA, 25 bp, probe
ttgatggttagcgaggccgtgcagg

SEQ ID NO: 301294 - DNA, 25 bp, probe
ttgtagtctttgctgccgtgaggca

SEQ ID NO: 301295 - DNA, 25 bp, probe
ttccatgttcttctcacaggaggag

SEQ ID NO: 301296 - DNA, 25 bp, probe
ttccatgttcttctcacaggaggag

SEQ ID NO: 301297 - DNA, 25 bp, probe
ttccagttctacttccagcagaagg

SEQ ID NO: 301298 - DNA, 25 bp, probe
ttccagttcccattcaacagagtag

SEQ ID NO: 301299 - DNA, 25 bp, probe
ttgggtcccacataaagcagtcagg

SEQ ID NO: 301300 - DNA, 25 bp, probe
ttgggtcccgtcgtgagcagaaagg

SEQ ID NO: 301301 - DNA, 25 bp, probe
ttgggtcccgtcgtgagcagaaagg

SEQ ID NO: 301302 - DNA, 25 bp, probe
ttgtcacctcacctcgggaaatgag

SEQ ID NO: 301303 - DNA, 25 bp, probe
ttggaagctgactgccgagtactga

SEQ ID NO: 301304 - DNA, 25 bp, probe
ttggaagctgactgccgagtactga

SEQ ID NO: 301305 - DNA, 25 bp, probe
ttgtgaagtgaacaatactttgtaa

SEQ ID NO: 301306 - DNA, 25 bp, probe
ttgggaggcaagcacaaactaggaa

SEQ ID NO: 301307 - DNA, 25 bp, probe
ttgtagatggaaccaccaacggtgg

SEQ ID NO: 301308 - DNA, 25 bp, probe
ttgccgatgatgaggaccgaagtga

SEQ ID NO: 301309 - DNA, 25 bp, probe
ttgctcggcttttgactggaccgag

SEQ ID NO: 301310 - DNA, 25 bp, probe
ttgacggtttatgctgggcactgcc

SEQ ID NO: 301311 - DNA, 25 bp, probe
ttgacagggatcacactggggcctc

SEQ ID NO: 301312 - DNA, 25 bp, probe
ttgcatccccaacactgtgtggaca

SEQ ID NO: 301313 - DNA, 25 bp, probe
ttccacaggcaaaactcagtagaga

SEQ ID NO: 301314 - DNA, 25 bp, probe
ttccagggcacaccagcacaggaaa

SEQ ID NO: 301315 - DNA, 25 bp, probe
ttccaggcgctacagcaggagtgca

SEQ ID NO: 301316 - DNA, 25 bp, probe
ttgccaccactcatcgcaggatgag

SEQ ID NO: 301317 - DNA, 25 bp, probe
ttgccacgtgtgttctcgtgtcaga

SEQ ID NO: 301318 - DNA, 25 bp, probe
ttcctcatgtgttactctgttgcag

SEQ ID NO: 301319 - DNA, 25 bp, probe
ttcctgcttatatttaggaacatat

SEQ ID NO: 301320 - DNA, 25 bp, probe
ttccttcttgcattttaagctctat

SEQ ID NO: 301321 - DNA, 25 bp, probe
ttcctatgctagtattggaagtgct

SEQ ID NO: 301322 - DNA, 25 bp, probe
ttcctggcttgtagtgtgcctgctg

SEQ ID NO: 301323 - DNA, 25 bp, probe
ttccaggtcatgtggctgcctttaa

SEQ ID NO: 301324 - DNA, 25 bp, probe
ttccaatcatatccttctcgtttga

SEQ ID NO: 301325 - DNA, 25 bp, probe
ttcccctataattgtgctgttttta

SEQ ID NO: 301326 - DNA, 25 bp, probe
ttcccctgattttatgagtttgggc

SEQ ID NO: 301327 - DNA, 25 bp, probe
ttgcagccgtgtggacgaagtttgg

SEQ ID NO: 301328 - DNA, 25 bp, probe
ttgcgcctggacaacgtgggtgagg

SEQ ID NO: 301329 - DNA, 25 bp, probe
ttgccttacacaaaggggatcataa

SEQ ID NO: 301330 - DNA, 25 bp, probe
ttcctgtaccacacggtggctcaga

SEQ ID NO: 301331 - DNA, 25 bp, probe
ttcctggaccatgactttggctcag

SEQ ID NO: 301332 - DNA, 25 bp, probe
ttcctgggccattggctttggcatc

SEQ ID NO: 301333 - DNA, 25 bp, probe
ttcctgggccattggctttggcatc

SEQ ID NO: 301334 - DNA, 25 bp, probe
ttcctcatggacaaggctgtgtcca

SEQ ID NO: 301335 - DNA, 25 bp, probe
ttgccctgcagggatggggctccac

SEQ ID NO: 301336 - DNA, 25 bp, probe
ttgcacttgagctctgtggtgggca

SEQ ID NO: 301337 - DNA, 25 bp, probe
ttgccccagcatcctggagctggag

SEQ ID NO: 301338 - DNA, 25 bp, probe
ttgccccagcatcctggagctggag

SEQ ID NO: 301339 - DNA, 25 bp, probe
ttgcccagagatcttacgaggcttg

SEQ ID NO: 301340 - DNA, 25 bp, probe
ttccaaggacctcacgatggtgctg

SEQ ID NO: 301341 - DNA, 25 bp, probe
ttccaaaatcttccttatgtgtaac

SEQ ID NO: 301342 - DNA, 25 bp, probe
ttgccaggaatttgctttgtttact

SEQ ID NO: 301343 - DNA, 25 bp, probe
ttccagggcttctttgtgtctgtgt

SEQ ID NO: 301344 - DNA, 25 bp, probe
ttgctacttctatgttggtcggtcc

SEQ ID NO: 301345 - DNA, 25 bp, probe
ttccagcttcaagaggcgtaggtcc

SEQ ID NO: 301346 - DNA, 25 bp, probe
ttccagctgctaaaaggcctcggat

SEQ ID NO: 301347 - DNA, 25 bp, probe
ttccagctgtggatgaacaccgtga

SEQ ID NO: 301348 - DNA, 25 bp, probe
ttccagctgtggatgaacaccgtga

SEQ ID NO: 301349 - DNA, 25 bp, probe
ttccacctggcaagtgacatcctgt

SEQ ID NO: 301350 - DNA, 25 bp, probe
ttgcctcctggaaccagatcctgga

SEQ ID NO: 301351 - DNA, 25 bp, probe
ttgcctcctggagtcgtgttcaggg

SEQ ID NO: 301352 - DNA, 25 bp, probe
ttcctggggacgctgtcacagggga

SEQ ID NO: 301353 - DNA, 25 bp, probe
ttcctgggctggccgatgtacaggg

SEQ ID NO: 301354 - DNA, 25 bp, probe
ttcctgctcatggtggctgtgtaca

SEQ ID NO: 301355 - DNA, 25 bp, probe
ttgcactctgctatggctgtggtat

SEQ ID NO: 301356 - DNA, 25 bp, probe
ttggctgcaggaaggcttggatatg

SEQ ID NO: 301357 - DNA, 25 bp, probe
ttggctgcaggaaggcttggatatg

SEQ ID NO: 301358 - DNA, 25 bp, probe
ttcctgaggatccatcatatagttc

SEQ ID NO: 301359 - DNA, 25 bp, probe
ttgctcaaaagccaaaagtctctga

SEQ ID NO: 301360 - DNA, 25 bp, probe
ttcctcagaactagaaagcctcatg

SEQ ID NO: 301361 - DNA, 25 bp, probe
ttgcttatgaaggaaaagccatagc

SEQ ID NO: 301362 - DNA, 25 bp, probe
ttgatatcaaagtcagtaagccaag

SEQ ID NO: 301363 - DNA, 25 bp, probe
ttgagtctcgagtcactagagccca

SEQ ID NO: 301364 - DNA, 25 bp, probe
ttgaattcagatgacattatgccag

SEQ ID NO: 301365 - DNA, 25 bp, probe
ttgcggtcgcgcggatcatgatgcc

SEQ ID NO: 301366 - DNA, 25 bp, probe
ttgcagggagccgagatcgtgccat

SEQ ID NO: 301367 - DNA, 25 bp, probe
ttgagagtgacccaaagatgagatg

SEQ ID NO: 301368 - DNA, 25 bp, probe
ttgaggatgtccctgaagtgccagc

SEQ ID NO: 301369 - DNA, 25 bp, probe
ttgaggatgtccctgaagtgccagc

SEQ ID NO: 301370 - DNA, 25 bp, probe
ttgtgtgtgccccagaaatgacact

SEQ ID NO: 301371 - DNA, 25 bp, probe
ttgctgatgataaaaggaagatgcc

SEQ ID NO: 301372 - DNA, 25 bp, probe
ttgctatgcgttatggaattgaatc

SEQ ID NO: 301373 - DNA, 25 bp, probe
ttgcatagagatattaaatgttcca

SEQ ID NO: 301374 - DNA, 25 bp, probe
ttgaaggatttctgagtgactcagc

SEQ ID NO: 301375 - DNA, 25 bp, probe
ttgaaggtttgatagctcgctgtta

SEQ ID NO: 301376 - DNA, 25 bp, probe
ttgaataattgtcttgtacttagaa

SEQ ID NO: 301377 - DNA, 25 bp, probe
ttgaatattcccaattttcgaagtc

SEQ ID NO: 301378 - DNA, 25 bp, probe
ttgtaaccacccttttctaacagca

SEQ ID NO: 301379 - DNA, 25 bp, probe
ttgtacagtgtcgctttttgaatag

SEQ ID NO: 301380 - DNA, 25 bp, probe
ttgttagaaccagtcttttgaaaga

SEQ ID NO: 301381 - DNA, 25 bp, probe
ttgttaaataccgttttcatgaaag

SEQ ID NO: 301382 - DNA, 25 bp, probe
ttgttaaataccgttttcatgaaag

SEQ ID NO: 301383 - DNA, 25 bp, probe
ttgcttataaaccagccacttctga

SEQ ID NO: 301384 - DNA, 25 bp, probe
ttcctaacacatgctgccatttctg

SEQ ID NO: 301385 - DNA, 25 bp, probe
ttgtgctaatcctctttttctagtc

SEQ ID NO: 301386 - DNA, 25 bp, probe
ttgctgacgattcacattttattag

SEQ ID NO: 301387 - DNA, 25 bp, probe
ttgctgaggttccttctattctgat

SEQ ID NO: 301388 - DNA, 25 bp, probe
ttgggtgtcttgcctctagaggctt

SEQ ID NO: 301389 - DNA, 25 bp, probe
ttgggtgtcttgcctctagaggctt

SEQ ID NO: 301390 - DNA, 25 bp, probe
ttgtagctgctctgaagtaaggatt

SEQ ID NO: 301391 - DNA, 25 bp, probe
ttgaaccctagatctcaggcttcct

SEQ ID NO: 301392 - DNA, 25 bp, probe
ttgcaaccctcttattcatggcttt

SEQ ID NO: 301393 - DNA, 25 bp, probe
ttgcaaccctcttattcatggcttt

SEQ ID NO: 301394 - DNA, 25 bp, probe
ttgcagaacctttaattggatgtgt

SEQ ID NO: 301395 - DNA, 25 bp, probe
ttgcagataagcctagtgatgggag

SEQ ID NO: 301396 - DNA, 25 bp, probe
ttgaatctagtatatgcgggatgta

SEQ ID NO: 301397 - DNA, 25 bp, probe
ttgaaccagactgcagcagcaaaaa

SEQ ID NO: 301398 - DNA, 25 bp, probe
ttgaagccatcaacatcacaaataa

SEQ ID NO: 301399 - DNA, 25 bp, probe
ttgaagccatcaacatcacaaataa

SEQ ID NO: 301400 - DNA, 25 bp, probe
ttgcaagtcacccatctcaggaaaa

SEQ ID NO: 301401 - DNA, 25 bp, probe
ttgacaccgtcgaccaggaaagcca

SEQ ID NO: 301402 - DNA, 25 bp, probe
ttgacactttgccaacacgacaagc

SEQ ID NO: 301403 - DNA, 25 bp, probe
ttgacatcccggacgccaagaagag

SEQ ID NO: 301404 - DNA, 25 bp, probe
ttgccagccacccacagaaagaagg

SEQ ID NO: 301405 - DNA, 25 bp, probe
ttcctgcgcctccgaagaagacaga

SEQ ID NO: 301406 - DNA, 25 bp, probe
ttcctgcgcctccgaagaagacaga

SEQ ID NO: 301407 - DNA, 25 bp, probe
ttgctctggctcagcaaaatcagaa

SEQ ID NO: 301408 - DNA, 25 bp, probe
ttgctctctgtgggacaaagcactg

SEQ ID NO: 301409 - DNA, 25 bp, probe
ttcctttgggactaagcgcagggag

SEQ ID NO: 301410 - DNA, 25 bp, probe
ttgcctgtacgcacaaaggagggag

SEQ ID NO: 301411 - DNA, 25 bp, probe
ttgctttgagctcacaccggaggag

SEQ ID NO: 301412 - DNA, 25 bp, probe
ttgctattggttcagcaagagaggc

SEQ ID NO: 301413 - DNA, 25 bp, probe
ttgcttgggatacagaagaggccat

SEQ ID NO: 301414 - DNA, 25 bp, probe
ttgcttgtggatttatagtagttca

SEQ ID NO: 301415 - DNA, 25 bp, probe
ttgcctctggtgttgggcttgttga

SEQ ID NO: 301416 - DNA, 25 bp, probe
ttgcctctggtgttgggcttgttga

SEQ ID NO: 301417 - DNA, 25 bp, probe
ttcctgctgcagaacgagtttgtgg

SEQ ID NO: 301418 - DNA, 25 bp, probe
ttccatgaggaaaatgtgctttggt

SEQ ID NO: 301419 - DNA, 25 bp, probe
ttccatcagatatatgtggctttga

SEQ ID NO: 301420 - DNA, 25 bp, probe
ttgcagccagaccgatgtgtattta

SEQ ID NO: 301421 - DNA, 25 bp, probe
ttgagctaggcacattactctctga

SEQ ID NO: 301422 - DNA, 25 bp, probe
ttgagctaggcacattactctctga

SEQ ID NO: 301423 - DNA, 25 bp, probe
ttgtcgcagtcacgatcaacttagg

SEQ ID NO: 301424 - DNA, 25 bp, probe
ttgctctcagatgcctcagatgcta

SEQ ID NO: 301425 - DNA, 25 bp, probe
ttgcccagatgttctcagatatggt

SEQ ID NO: 301426 - DNA, 25 bp, probe
ttgccagcagataaatcatgcccgt

SEQ ID NO: 301427 - DNA, 25 bp, probe
ttgcttaattaattgcctcgctacc

SEQ ID NO: 301428 - DNA, 25 bp, probe
ttgtatagttcacttactcttacac

SEQ ID NO: 301429 - DNA, 25 bp, probe
ttgtatggttggttactctttacgg

SEQ ID NO: 301430 - DNA, 25 bp, probe
ttgtatggttggttactctttacgg

SEQ ID NO: 301431 - DNA, 25 bp, probe
ttgacaaagtcctcacttttaagga

SEQ ID NO: 301432 - DNA, 25 bp, probe
ttgaaaagtttgcagcttatgtaat

SEQ ID NO: 301433 - DNA, 25 bp, probe
ttgtaaatcctgtgtttcattactt

SEQ ID NO: 301434 - DNA, 25 bp, probe
ttgtaatagccacaagttcttgttt

SEQ ID NO: 301435 - DNA, 25 bp, probe
ttgtacaagatcccactctttgctt

SEQ ID NO: 301436 - DNA, 25 bp, probe
ttgtatcaaaatcactatctttctg

SEQ ID NO: 301437 - DNA, 25 bp, probe
ttgttcacaacatgcgtatttatag

SEQ ID NO: 301438 - DNA, 25 bp, probe
ttgtcttcaagatgcaatacttttc

SEQ ID NO: 301439 - DNA, 25 bp, probe
ttcctaatatgctggtgccctttct

SEQ ID NO: 301440 - DNA, 25 bp, probe
ttcctaatatgctggtgccctttct

SEQ ID NO: 301441 - DNA, 25 bp, probe
ttcctattcatcaggctgtactttc

SEQ ID NO: 301442 - DNA, 25 bp, probe
ttcctattcatcaggctgtactttc

SEQ ID NO: 301443 - DNA, 25 bp, probe
ttgcccttctgcagaagtcctttca

SEQ ID NO: 301444 - DNA, 25 bp, probe
ttgcccttctgcagaagtcctttca

SEQ ID NO: 301445 - DNA, 25 bp, probe
ttccttatgtgtaacgtttgattca

SEQ ID NO: 301446 - DNA, 25 bp, probe
ttccatttggcactatggtttgttg

SEQ ID NO: 301447 - DNA, 25 bp, probe
ttccagtattcattgatttatttct

SEQ ID NO: 301448 - DNA, 25 bp, probe
ttccttttcttgaatttatttccat

SEQ ID NO: 301449 - DNA, 25 bp, probe
ttgccgatttttgaatgtgatttta

SEQ ID NO: 301450 - DNA, 25 bp, probe
ttccattttttttacagactgttca

SEQ ID NO: 301451 - DNA, 25 bp, probe
ttccattttttttacagactgttca

SEQ ID NO: 301452 - DNA, 25 bp, probe
ttcctgtttcttagtccgaatgtta

SEQ ID NO: 301453 - DNA, 25 bp, probe
ttgctctgggttatctgggaagtat

SEQ ID NO: 301454 - DNA, 25 bp, probe
ttccttgtgtgtagctgctcggaca

SEQ ID NO: 301455 - DNA, 25 bp, probe
ttccttgtgtgtagctgctcggaca

SEQ ID NO: 301456 - DNA, 25 bp, probe
ttccttgcctgtgttcagtggcacc

SEQ ID NO: 301457 - DNA, 25 bp, probe
ttcctgccactggtttcaggatact

SEQ ID NO: 301458 - DNA, 25 bp, probe
ttggctgcacctctatgtcaggatt

SEQ ID NO: 301459 - DNA, 25 bp, probe
ttgctggacctaaaatcaatgatcg

SEQ ID NO: 301460 - DNA, 25 bp, probe
ttccaacacttgatcataagccagt

SEQ ID NO: 301461 - DNA, 25 bp, probe
ttgcagccagagttggacaaagcca

SEQ ID NO: 301462 - DNA, 25 bp, probe
ttgaagcagatgtggacaactccaa

SEQ ID NO: 301463 - DNA, 25 bp, probe
ttgtcagcctggagaccagcaccag

SEQ ID NO: 301464 - DNA, 25 bp, probe
ttgctcagccatctgagatgccccc

SEQ ID NO: 301465 - DNA, 25 bp, probe
ttgctggcacggggatgtgccctgc

SEQ ID NO: 301466 - DNA, 25 bp, probe
ttgctggctgggcgagatgagcacc

SEQ ID NO: 301467 - DNA, 25 bp, probe
ttgcccatggctgggaacatgaccc

SEQ ID NO: 301468 - DNA, 25 bp, probe
ttgctcgagagcatgggacagcctc

SEQ ID NO: 301469 - DNA, 25 bp, probe
ttgctcgatacatccgagctgccct

SEQ ID NO: 301470 - DNA, 25 bp, probe
ttgctcgatacatccgagctgccct

SEQ ID NO: 301471 - DNA, 25 bp, probe
ttgctcgatacatccgagctgccct

SEQ ID NO: 301472 - DNA, 25 bp, probe
ttgccgagttgagggcagctggcct

SEQ ID NO: 301473 - DNA, 25 bp, probe
ttgccgagttgagggcagctggcct

SEQ ID NO: 301474 - DNA, 25 bp, probe
ttcctgggtcaaggatgctcacatc

SEQ ID NO: 301475 - DNA, 25 bp, probe
ttcctgggtgacaatgatgctgaga

SEQ ID NO: 301476 - DNA, 25 bp, probe
ttgcgctcggtgcgatactgatgat

SEQ ID NO: 301477 - DNA, 25 bp, probe
ttccaggtgttggtacatatgatga

SEQ ID NO: 301478 - DNA, 25 bp, probe
ttcctcatgtttctgacattgtatg

SEQ ID NO: 301479 - DNA, 25 bp, probe
ttcctgcatttgatagcaatgtaag

SEQ ID NO: 301480 - DNA, 25 bp, probe
ttccacatactgttaagatgtagac

SEQ ID NO: 301481 - DNA, 25 bp, probe
ttccacagaatgatcaagttgacga

SEQ ID NO: 301482 - DNA, 25 bp, probe
ttccactgcctggccaaggtttgag

SEQ ID NO: 301483 - DNA, 25 bp, probe
ttgcacactttggcccagggtggcc

SEQ ID NO: 301484 - DNA, 25 bp, probe
ttgtggcatcttgccaagggtccct

SEQ ID NO: 301485 - DNA, 25 bp, probe
ttgttgccccactaaggaatcactt

SEQ ID NO: 301486 - DNA, 25 bp, probe
ttgtggctccccgaatgggtagctt

SEQ ID NO: 301487 - DNA, 25 bp, probe
ttgtggctccccgaatgggtagctt

SEQ ID NO: 301488 - DNA, 25 bp, probe
ttgccgcccgagatatgagggagct

SEQ ID NO: 301489 - DNA, 25 bp, probe
ttccactgccagatttatgggatgc

SEQ ID NO: 301490 - DNA, 25 bp, probe
ttgcacctccagtttgcacagggat

SEQ ID NO: 301491 - DNA, 25 bp, probe
ttgcatcctacaatttgccactgcc

SEQ ID NO: 301492 - DNA, 25 bp, probe
ttgccctcacagtggtatgtgctgc

SEQ ID NO: 301493 - DNA, 25 bp, probe
ttgcacaccagcaaaggcaactctg

SEQ ID NO: 301494 - DNA, 25 bp, probe
ttgccccactaaggaatcactttag

SEQ ID NO: 301495 - DNA, 25 bp, probe
ttccaccaccaataatcatctcatt

SEQ ID NO: 301496 - DNA, 25 bp, probe
ttcctccaccaatgaagctgaataa

SEQ ID NO: 301497 - DNA, 25 bp, probe
ttcctccatctccaagaatgctgaa

SEQ ID NO: 301498 - DNA, 25 bp, probe
ttcctgcgcattgacatgtatgcca

SEQ ID NO: 301499 - DNA, 25 bp, probe
ttgcctcagaaggagctgtgagcca

SEQ ID NO: 301500 - DNA, 25 bp, probe
ttgcacggcaagggcatcattcaca

SEQ ID NO: 301501 - DNA, 25 bp, probe
ttgcaaggagataggagctcatatc

SEQ ID NO: 301502 - DNA, 25 bp, probe
ttgcacagggattggaacatgattt

SEQ ID NO: 301503 - DNA, 25 bp, probe
ttccttccatagccagcaatgttgt

SEQ ID NO: 301504 - DNA, 25 bp, probe
ttcctgtccagagatgctcataggt

SEQ ID NO: 301505 - DNA, 25 bp, probe
ttcctgtgacagcgatgccatagag

SEQ ID NO: 301506 - DNA, 25 bp, probe
ttcctgctgccacgtggagaagggt

SEQ ID NO: 301507 - DNA, 25 bp, probe
ttgcatgatctgtcaaagtgagata

SEQ ID NO: 301508 - DNA, 25 bp, probe
ttgccattgccaacagctgcatgaa

SEQ ID NO: 301509 - DNA, 25 bp, probe
ttgcaatttgcaatccactacgtta

SEQ ID NO: 301510 - DNA, 25 bp, probe
ttgaatatgatctcccataatttga

SEQ ID NO: 301511 - DNA, 25 bp, probe
ttgaattcacattccctgactttgt

SEQ ID NO: 301512 - DNA, 25 bp, probe
ttgatgttgaaatcctggccttggg

SEQ ID NO: 301513 - DNA, 25 bp, probe
ttgaattaaattgtatccgtggatc

SEQ ID NO: 301514 - DNA, 25 bp, probe
ttggcctatccagttttcctggttc

SEQ ID NO: 301515 - DNA, 25 bp, probe
ttggcctatccagttttcctggttc

SEQ ID NO: 301516 - DNA, 25 bp, probe
ttgaaatcacctgttatccttgttt

SEQ ID NO: 301517 - DNA, 25 bp, probe
ttgtaaccttgaattaggcagtggt

SEQ ID NO: 301518 - DNA, 25 bp, probe
ttcctaggcttgattcatggaggga

SEQ ID NO: 301519 - DNA, 25 bp, probe
ttgtcataactttgtgttggaggga

SEQ ID NO: 301520 - DNA, 25 bp, probe
ttgactaccattgggttcggggact

SEQ ID NO: 301521 - DNA, 25 bp, probe
ttgactaccattgggttcggggact

SEQ ID NO: 301522 - DNA, 25 bp, probe
ttgatctcccggtcagttcgggatg

SEQ ID NO: 301523 - DNA, 25 bp, probe
ttgaatgaaagcacacttcgggatg

SEQ ID NO: 301524 - DNA, 25 bp, probe
ttgaaataatgcggggtctgcggca

SEQ ID NO: 301525 - DNA, 25 bp, probe
ttgcagttaactggggtatcagctg

SEQ ID NO: 301526 - DNA, 25 bp, probe
ttggccatacagggaggttcattgt

SEQ ID NO: 301527 - DNA, 25 bp, probe
ttgagcaacaagctaactccatttc

SEQ ID NO: 301528 - DNA, 25 bp, probe
ttgcagccacaggggcaacacctgt

SEQ ID NO: 301529 - DNA, 25 bp, probe
ttgagtgcactgactgtgaaacctt

SEQ ID NO: 301530 - DNA, 25 bp, probe
ttggtcactactgaagagctgcctc

SEQ ID NO: 301531 - DNA, 25 bp, probe
ttggtcactactgaagagctgcctc

SEQ ID NO: 301532 - DNA, 25 bp, probe
ttggtaatagtaaatcgttctcctt

SEQ ID NO: 301533 - DNA, 25 bp, probe
ttgaggaaagtcagtctactccctt

SEQ ID NO: 301534 - DNA, 25 bp, probe
ttggctgagagctcacttctaatcc

SEQ ID NO: 301535 - DNA, 25 bp, probe
ttggccagtcttggcattctcatca

SEQ ID NO: 301536 - DNA, 25 bp, probe
ttgccaattcatatattgccatgca

SEQ ID NO: 301537 - DNA, 25 bp, probe
ttgcctatcgtaaattcacatcagc

SEQ ID NO: 301538 - DNA, 25 bp, probe
ttccttcatgtaagactttggccga

SEQ ID NO: 301539 - DNA, 25 bp, probe
ttcctgtctgtgtaaattgttccgt

SEQ ID NO: 301540 - DNA, 25 bp, probe
ttcctatcaccatacttttccatgt

SEQ ID NO: 301541 - DNA, 25 bp, probe
ttcctatccaaaatccttgtccaag

SEQ ID NO: 301542 - DNA, 25 bp, probe
ttgaaatccaaactactttcttaat

SEQ ID NO: 301543 - DNA, 25 bp, probe
ttgacaaccagcggtactattttaa

SEQ ID NO: 301544 - DNA, 25 bp, probe
ttgatagacctggcactgcctatct

SEQ ID NO: 301545 - DNA, 25 bp, probe
ttgatagacctggcactgcctatct

SEQ ID NO: 301546 - DNA, 25 bp, probe
ttgaagactcattcagctctgccat

SEQ ID NO: 301547 - DNA, 25 bp, probe
ttgaccatatcaacagtggccaggt

SEQ ID NO: 301548 - DNA, 25 bp, probe
ttgacaaatctgagggccgcttcca

SEQ ID NO: 301549 - DNA, 25 bp, probe
ttgaaagctcgccgggcggcaatct

SEQ ID NO: 301550 - DNA, 25 bp, probe
ttgagtagggccggccagtgcaagg

SEQ ID NO: 301551 - DNA, 25 bp, probe
ttgagtagggccggccagtgcaagg

SEQ ID NO: 301552 - DNA, 25 bp, probe
ttgagacggctgacctgaaggagac

SEQ ID NO: 301553 - DNA, 25 bp, probe
ttgatggcgagtggtgctgaaggga

SEQ ID NO: 301554 - DNA, 25 bp, probe
ttgccgccaacgatgcaagtgtgac

SEQ ID NO: 301555 - DNA, 25 bp, probe
ttgctccttgactttgaagttgcca

SEQ ID NO: 301556 - DNA, 25 bp, probe
ttgcccggatcattggagagaagtc

SEQ ID NO: 301557 - DNA, 25 bp, probe
ttgccagggtttcgagaagctgctc

SEQ ID NO: 301558 - DNA, 25 bp, probe
ttgccaggccatcgtggacacaggc

SEQ ID NO: 301559 - DNA, 25 bp, probe
ttccatgatgcccgggcagcacatg

SEQ ID NO: 301560 - DNA, 25 bp, probe
ttgatgctgttctgggcagccatga

SEQ ID NO: 301561 - DNA, 25 bp, probe
ttgatcgctatgtggccatctgcaa

SEQ ID NO: 301562 - DNA, 25 bp, probe
ttgaccagctgaagcgcatcatgga

SEQ ID NO: 301563 - DNA, 25 bp, probe
ttgacatcagcattccagcagcagc

SEQ ID NO: 301564 - DNA, 25 bp, probe
ttgacacgatatctcgagctgcctt

SEQ ID NO: 301565 - DNA, 25 bp, probe
ttgacacgatatctcgagctgcctt

SEQ ID NO: 301566 - DNA, 25 bp, probe
ttgatccgatcgacggcactgcgaa

SEQ ID NO: 301567 - DNA, 25 bp, probe
ttgctccctagaagaagctcaaagg

SEQ ID NO: 301568 - DNA, 25 bp, probe
ttgcctgcttagatgataaaatgag

SEQ ID NO: 301569 - DNA, 25 bp, probe
ttgccagcttggagatagaaaggaa

SEQ ID NO: 301570 - DNA, 25 bp, probe
ttccagctgctgatcgaagaaaaga

SEQ ID NO: 301571 - DNA, 25 bp, probe
ttccaggctctagggcaagaaaaca

SEQ ID NO: 301572 - DNA, 25 bp, probe
ttgccagctgctgagccgcagagaa

SEQ ID NO: 301573 - DNA, 25 bp, probe
ttgctctctttaccagacaggcagc

SEQ ID NO: 301574 - DNA, 25 bp, probe
ttgcccattcacacaatcaggagct

SEQ ID NO: 301575 - DNA, 25 bp, probe
ttgcccattcacacaatcaggagct

SEQ ID NO: 301576 - DNA, 25 bp, probe
ttgcccatgtcctgccaaggagaga

SEQ ID NO: 301577 - DNA, 25 bp, probe
ttgcccatgtcctgccaaggagaga

SEQ ID NO: 301578 - DNA, 25 bp, probe
ttgcctctgtgattggcccaggagg

SEQ ID NO: 301579 - DNA, 25 bp, probe
ttccatcatgtcaaggtcacaggca

SEQ ID NO: 301580 - DNA, 25 bp, probe
ttgactgatgtgaattccatagaca

SEQ ID NO: 301581 - DNA, 25 bp, probe
ttgcagtgattaatcccaaggcaaa

SEQ ID NO: 301582 - DNA, 25 bp, probe
ttgaggtgtaattgcacaagtaaaa

SEQ ID NO: 301583 - DNA, 25 bp, probe
ttgtggtggtttccttataagacgg

SEQ ID NO: 301584 - DNA, 25 bp, probe
ttgaagggttctcgtatgtcaaccc

SEQ ID NO: 301585 - DNA, 25 bp, probe
ttgaaggttttgagtatatcaatcc

SEQ ID NO: 301586 - DNA, 25 bp, probe
ttgcaactcatgttatgggttaaat

SEQ ID NO: 301587 - DNA, 25 bp, probe
ttgcatgaatcagatgtgtgttctc

SEQ ID NO: 301588 - DNA, 25 bp, probe
ttgctattgcgtggtgtctccgcag

SEQ ID NO: 301589 - DNA, 25 bp, probe
ttgaatgtgtggggtttcccctcag

SEQ ID NO: 301590 - DNA, 25 bp, probe
ttgaatatggaggtttcccaccaga

SEQ ID NO: 301591 - DNA, 25 bp, probe
ttgaatatggaggtttcccaccaga

SEQ ID NO: 301592 - DNA, 25 bp, probe
ttgatttgtatccactgtcaccagc

SEQ ID NO: 301593 - DNA, 25 bp, probe
ttgacatcttttccatgatcatcta

SEQ ID NO: 301594 - DNA, 25 bp, probe
ttgacattcatttacagatttggga

SEQ ID NO: 301595 - DNA, 25 bp, probe
ttgaggccagagtatcgccctggga

SEQ ID NO: 301596 - DNA, 25 bp, probe
ttgacccagatatctccgttatgca

SEQ ID NO: 301597 - DNA, 25 bp, probe
ttgacacttgttgtccagttgaaaa

SEQ ID NO: 301598 - DNA, 25 bp, probe
ttgagacttagtgaccatttggcat

SEQ ID NO: 301599 - DNA, 25 bp, probe
ttgaaattcaccatcaccttggctc

SEQ ID NO: 301600 - DNA, 25 bp, probe
ttgaaattcaccatcaccttggctc

SEQ ID NO: 301601 - DNA, 25 bp, probe
ttgaaattcaccatcaccttggctc

SEQ ID NO: 301602 - DNA, 25 bp, probe
ttgaagttgcagtccatcaccttcc

SEQ ID NO: 301603 - DNA, 25 bp, probe
ttgctagttacccaacattacgcca

SEQ ID NO: 301604 - DNA, 25 bp, probe
ttgctcgtatggccctagcattact

SEQ ID NO: 301605 - DNA, 25 bp, probe
ttgcctatctgacttcatacatccc

SEQ ID NO: 301606 - DNA, 25 bp, probe
ttgcctatctgacttcatacatccc

SEQ ID NO: 301607 - DNA, 25 bp, probe
ttgcactggctgcattcacaacgtc

SEQ ID NO: 301608 - DNA, 25 bp, probe
ttgattgtgctggcaaatatactgt

SEQ ID NO: 301609 - DNA, 25 bp, probe
ttgagatgtgtgcaaatctaattaa

SEQ ID NO: 301610 - DNA, 25 bp, probe
ttgtattggccatctggaatatgca

SEQ ID NO: 301611 - DNA, 25 bp, probe
ttgccaatggcctcctaatagccta

SEQ ID NO: 301612 - DNA, 25 bp, probe
ttgagccagggctgccatataacct

SEQ ID NO: 301613 - DNA, 25 bp, probe
ttgtcgtgggcatgctcattaaagc

SEQ ID NO: 301614 - DNA, 25 bp, probe
ttgtcttgggctggacatataattg

SEQ ID NO: 301615 - DNA, 25 bp, probe
ttgtcataggtattacttaaatagg

SEQ ID NO: 301616 - DNA, 25 bp, probe
ttgtgaagtgtttccttagaagaag

SEQ ID NO: 301617 - DNA, 25 bp, probe
ttgggaagggcaactttgccaaagt

SEQ ID NO: 301618 - DNA, 25 bp, probe
ttggggaggctgatttctcacacac

SEQ ID NO: 301619 - DNA, 25 bp, probe
ttggggatggaccttcagctgaaac

SEQ ID NO: 301620 - DNA, 25 bp, probe
ttgggagatggctcgtcgttgtatc

SEQ ID NO: 301621 - DNA, 25 bp, probe
ttgtggaggtggtcggcaatggaac

SEQ ID NO: 301622 - DNA, 25 bp, probe
ttgctggacgggacggcagacgatg

SEQ ID NO: 301623 - DNA, 25 bp, probe
ttgctggggaggcctggagtcaggt

SEQ ID NO: 301624 - DNA, 25 bp, probe
ttgctggggaggcctggagtcaggt

SEQ ID NO: 301625 - DNA, 25 bp, probe
ttgcttctggggctgtgaaacgctc

SEQ ID NO: 301626 - DNA, 25 bp, probe
ttgctactttggttgtggtcactcc

SEQ ID NO: 301627 - DNA, 25 bp, probe
ttgctgccttcatgaaggagatcct

SEQ ID NO: 301628 - DNA, 25 bp, probe
ttgcccatatcaggacagtggctcc

SEQ ID NO: 301629 - DNA, 25 bp, probe
ttgccgattcaccagcacttgctcg

SEQ ID NO: 301630 - DNA, 25 bp, probe
ttgccaaatgcacggagctctgcca

SEQ ID NO: 301631 - DNA, 25 bp, probe
ttgctcaagatcccaagttcatcga

SEQ ID NO: 301632 - DNA, 25 bp, probe
ttgccaagtgccataaccatgagca

SEQ ID NO: 301633 - DNA, 25 bp, probe
ttccaactcgtatagcatgcatctg

SEQ ID NO: 301634 - DNA, 25 bp, probe
ttccaactcgtatagcatgcatctg

SEQ ID NO: 301635 - DNA, 25 bp, probe
ttccaccctgtctaggcacatgtgg

SEQ ID NO: 301636 - DNA, 25 bp, probe
ttccagccattttactgcagcagtc

SEQ ID NO: 301637 - DNA, 25 bp, probe
ttgcccagacagtcatgactagcag

SEQ ID NO: 301638 - DNA, 25 bp, probe
ttgccctgaccttgatcaacagggg

SEQ ID NO: 301639 - DNA, 25 bp, probe
ttgccatttctccaaaactggtggc

SEQ ID NO: 301640 - DNA, 25 bp, probe
ttccttctcagccgaaacaggtcca

SEQ ID NO: 301641 - DNA, 25 bp, probe
ttcctatgtgggcgacgaggcccag

SEQ ID NO: 301642 - DNA, 25 bp, probe
ttcctagggctgtggagtgaggcca

SEQ ID NO: 301643 - DNA, 25 bp, probe
ttccatccaggcactgaaggaggcg

SEQ ID NO: 301644 - DNA, 25 bp, probe
ttccaactgaatatgagaggaacgg

SEQ ID NO: 301645 - DNA, 25 bp, probe
ttccaacttgctcatgaccgacaag

SEQ ID NO: 301646 - DNA, 25 bp, probe
ttccagtcgctacagagcccaaatg

SEQ ID NO: 301647 - DNA, 25 bp, probe
ttccagtcgctacagagcccaaatg

SEQ ID NO: 301648 - DNA, 25 bp, probe
ttccagcccttcttgatgccaaggg

SEQ ID NO: 301649 - DNA, 25 bp, probe
ttccatggagttctgatctttgggc

SEQ ID NO: 301650 - DNA, 25 bp, probe
ttccaggacttgcttcatgcttgag

SEQ ID NO: 301651 - DNA, 25 bp, probe
ttccaggacttgcttcatgcttgag

SEQ ID NO: 301652 - DNA, 25 bp, probe
ttccagtcagtttttctcttaagtg

SEQ ID NO: 301653 - DNA, 25 bp, probe
ttccaggagtttgtcaataaatgcc

SEQ ID NO: 301654 - DNA, 25 bp, probe
ttgctcggagcattgatttcaacaa

SEQ ID NO: 301655 - DNA, 25 bp, probe
ttgtgcaggcgcagagtcctataga

SEQ ID NO: 301656 - DNA, 25 bp, probe
ttgcctaggcatagcctgcctcaag

SEQ ID NO: 301657 - DNA, 25 bp, probe
ttgcctacctagctgcatctataat

SEQ ID NO: 301658 - DNA, 25 bp, probe
ttgcctctactacgtcaggcagaat

SEQ ID NO: 301659 - DNA, 25 bp, probe
ttgcctttctgatatatggctacat

SEQ ID NO: 301660 - DNA, 25 bp, probe
ttccttgccttgttgatgtggacat

SEQ ID NO: 301661 - DNA, 25 bp, probe
ttccttgccttattcatttgagaca

SEQ ID NO: 301662 - DNA, 25 bp, probe
ttccattcctgatacactgtacaca

SEQ ID NO: 301663 - DNA, 25 bp, probe
ttccactcggatgacaccatcacca

SEQ ID NO: 301664 - DNA, 25 bp, probe
ttgcttcttggtaaatcccagctcc

SEQ ID NO: 301665 - DNA, 25 bp, probe
ttgcttcttggtaaatcccagctcc

SEQ ID NO: 301666 - DNA, 25 bp, probe
ttgttgatgaggattcgcccgtcct

SEQ ID NO: 301667 - DNA, 25 bp, probe
ttgttgatgaggattcgcccgtcct

SEQ ID NO: 301668 - DNA, 25 bp, probe
ttgtgcataaggacttggctgcgcg

SEQ ID NO: 301669 - DNA, 25 bp, probe
ttgtcaacaagtttactctccgtct

SEQ ID NO: 301670 - DNA, 25 bp, probe
ttgaaaaaccattttgctgtccctt

SEQ ID NO: 301671 - DNA, 25 bp, probe
ttgaaataaaccttagctgccccac

SEQ ID NO: 301672 - DNA, 25 bp, probe
ttgaaataaaccttagctgccccac

SEQ ID NO: 301673 - DNA, 25 bp, probe
ttgaaataaaccttagctgccccac

SEQ ID NO: 301674 - DNA, 25 bp, probe
ttgaaataaaccttagctgccccac

SEQ ID NO: 301675 - DNA, 25 bp, probe
ttgaaaatatactttagagcacaat

SEQ ID NO: 301676 - DNA, 25 bp, probe
ttgcaatacaaactgctcttgacaa

SEQ ID NO: 301677 - DNA, 25 bp, probe
ttgccagaaatgctgttctcaccag

SEQ ID NO: 301678 - DNA, 25 bp, probe
ttgacacttagccgctgtctcgccg

SEQ ID NO: 301679 - DNA, 25 bp, probe
ttgatcgtttcggctggcaagcctg

SEQ ID NO: 301680 - DNA, 25 bp, probe
ttgcacagtaggatgtggaacctgt

SEQ ID NO: 301681 - DNA, 25 bp, probe
ttgaagtacagtggtgaaaacatta

SEQ ID NO: 301682 - DNA, 25 bp, probe
ttgaagtcttggagaccaaatataa

SEQ ID NO: 301683 - DNA, 25 bp, probe
ttgagacctattctgaccaaactat

SEQ ID NO: 301684 - DNA, 25 bp, probe
ttgtacctctggctgactaaatttg

SEQ ID NO: 301685 - DNA, 25 bp, probe
ttgtcatccgctcggtgttgactga

SEQ ID NO: 301686 - DNA, 25 bp, probe
ttgctcttcctactgtacatattgg

SEQ ID NO: 301687 - DNA, 25 bp, probe
ttgctcttcctactgtacatattgg

SEQ ID NO: 301688 - DNA, 25 bp, probe
ttgccaacctgaatgtccttctgca

SEQ ID NO: 301689 - DNA, 25 bp, probe
ttgcttaccgtgttctactgcatca

SEQ ID NO: 301690 - DNA, 25 bp, probe
ttcctacattttcatactgctgcct

SEQ ID NO: 301691 - DNA, 25 bp, probe
ttgactttgtttcatactgccaata

SEQ ID NO: 301692 - DNA, 25 bp, probe
ttgtctgtcaggggcgtatccacaa

SEQ ID NO: 301693 - DNA, 25 bp, probe
ttgaatgtacacagcgaaccacagg

SEQ ID NO: 301694 - DNA, 25 bp, probe
ttgaataaactacaacaacacagtg

SEQ ID NO: 301695 - DNA, 25 bp, probe
ttgaattatagttctcaacaataat

SEQ ID NO: 301696 - DNA, 25 bp, probe
ttgacatgttcactgtttaactaca

SEQ ID NO: 301697 - DNA, 25 bp, probe
ttgcaattgtccatgtgtttctcca

SEQ ID NO: 301698 - DNA, 25 bp, probe
ttgcaattgtccatgtgtttctcca

SEQ ID NO: 301699 - DNA, 25 bp, probe
ttgcatgattcttcttggtctactg

SEQ ID NO: 301700 - DNA, 25 bp, probe
ttccttgctatcaggatgcataggg

SEQ ID NO: 301701 - DNA, 25 bp, probe
ttccttgatagggtgctgccatggc

SEQ ID NO: 301702 - DNA, 25 bp, probe
ttccttctgggcattacatcgcata

SEQ ID NO: 301703 - DNA, 25 bp, probe
ttccttctgggcattacatcgcata

SEQ ID NO: 301704 - DNA, 25 bp, probe
ttccttctgtgcctttgaatacaaa

SEQ ID NO: 301705 - DNA, 25 bp, probe
ttgcctcacagttgtttgtttacaa

SEQ ID NO: 301706 - DNA, 25 bp, probe
ttgctggcaactgacttgtcattaa

SEQ ID NO: 301707 - DNA, 25 bp, probe
ttgctggtactatttatgtaacact

SEQ ID NO: 301708 - DNA, 25 bp, probe
ttgccttattcatttgagacaaact

SEQ ID NO: 301709 - DNA, 25 bp, probe
ttgccatctaccttgggatcaaacg

SEQ ID NO: 301710 - DNA, 25 bp, probe
ttgccatctaccttgggatcaaacg

SEQ ID NO: 301711 - DNA, 25 bp, probe
ttggatcgtccactgggaccaactg

SEQ ID NO: 301712 - DNA, 25 bp, probe
ttggtgtccaacagagtctaggctg

SEQ ID NO: 301713 - DNA, 25 bp, probe
ttgaagttcttcaaaactagtcagt

SEQ ID NO: 301714 - DNA, 25 bp, probe
ttgaatattcttgaacaccaccact

SEQ ID NO: 301715 - DNA, 25 bp, probe
ttgaaatatcgaggccacagtcccc

SEQ ID NO: 301716 - DNA, 25 bp, probe
ttgaagttccagggagcttgcccgg

SEQ ID NO: 301717 - DNA, 25 bp, probe
ttgggtgggcagggacggccaggta

SEQ ID NO: 301718 - DNA, 25 bp, probe
ttggttggagcaggtactggcccca

SEQ ID NO: 301719 - DNA, 25 bp, probe
ttggttggagcaggtactggcccca

SEQ ID NO: 301720 - DNA, 25 bp, probe
ttggtgcttgtacaactgtgcggcc

SEQ ID NO: 301721 - DNA, 25 bp, probe
ttgggctggacatataattgctggc

SEQ ID NO: 301722 - DNA, 25 bp, probe
ttggccagccaaaaagactgtgcgt

SEQ ID NO: 301723 - DNA, 25 bp, probe
ttgagaagccacgcatggacgacgg

SEQ ID NO: 301724 - DNA, 25 bp, probe
ttgaaatcgtaaagcgagctgacgc

SEQ ID NO: 301725 - DNA, 25 bp, probe
ttgaatccttcaaacgtgctgacat

SEQ ID NO: 301726 - DNA, 25 bp, probe
ttgagcacctacattaatgctaatt

SEQ ID NO: 301727 - DNA, 25 bp, probe
ttgcacaactccaatgctaaaggtt

SEQ ID NO: 301728 - DNA, 25 bp, probe
ttccaagcttgcctccaagagttac

SEQ ID NO: 301729 - DNA, 25 bp, probe
ttgcacatagttctgcccaaattat

SEQ ID NO: 301730 - DNA, 25 bp, probe
ttgcatctgacattttacctaaaaa

SEQ ID NO: 301731 - DNA, 25 bp, probe
ttgctctgatcattgctgattcctt

SEQ ID NO: 301732 - DNA, 25 bp, probe
ttgctgctggaaagtatcctgcatg

SEQ ID NO: 301733 - DNA, 25 bp, probe
ttgctgctggaaagtatcctgcatg

SEQ ID NO: 301734 - DNA, 25 bp, probe
ttgctgtggcctagacttctgagta

SEQ ID NO: 301735 - DNA, 25 bp, probe
ttgctgtggcctagacttctgagta

SEQ ID NO: 301736 - DNA, 25 bp, probe
ttgcgtggatcatgacttgctgccc

SEQ ID NO: 301737 - DNA, 25 bp, probe
ttgcagtgcgccaagttgctgctgg

SEQ ID NO: 301738 - DNA, 25 bp, probe
ttgggcccaacgtctgcatgggaga

SEQ ID NO: 301739 - DNA, 25 bp, probe
ttggcccgcaactgtggccgagaaa

SEQ ID NO: 301740 - DNA, 25 bp, probe
ttgctccccaagtgggcctgattta

SEQ ID NO: 301741 - DNA, 25 bp, probe
ttgctccccaagtgggcctgattta

SEQ ID NO: 301742 - DNA, 25 bp, probe
ttccacccatggtgatggatggttt

SEQ ID NO: 301743 - DNA, 25 bp, probe
ttgacagcgacaagaagtggggctt

SEQ ID NO: 301744 - DNA, 25 bp, probe
ttgaagctggcaagaccctgttttc

SEQ ID NO: 301745 - DNA, 25 bp, probe
ttgaagctggcaagaccctgttttc

SEQ ID NO: 301746 - DNA, 25 bp, probe
ttggactggatccaccactatgtcc

SEQ ID NO: 301747 - DNA, 25 bp, probe
ttggacatggaggcctgacagctgt

SEQ ID NO: 301748 - DNA, 25 bp, probe
ttgccagacgtgtcctgaatgctgt

SEQ ID NO: 301749 - DNA, 25 bp, probe
ttgccgactgcttttcatctgagtc

SEQ ID NO: 301750 - DNA, 25 bp, probe
ttgtcgccatcttctacttaattac

SEQ ID NO: 301751 - DNA, 25 bp, probe
ttggccttctacagctattactgaa

SEQ ID NO: 301752 - DNA, 25 bp, probe
ttgtcctatttttgtcattactata

SEQ ID NO: 301753 - DNA, 25 bp, probe
ttgtcctgtgggattcatcttcaaa

SEQ ID NO: 301754 - DNA, 25 bp, probe
ttgtcacgagacattttttaaaatc

SEQ ID NO: 301755 - DNA, 25 bp, probe
ttgtaatgcagagttttttttccgt

SEQ ID NO: 301756 - DNA, 25 bp, probe
ttgtactggcaggctcgttttacct

SEQ ID NO: 301757 - DNA, 25 bp, probe
ttgtgaccagcagcaggcttttttc

SEQ ID NO: 301758 - DNA, 25 bp, probe
ttgtattaggacccaaaatttctag

SEQ ID NO: 301759 - DNA, 25 bp, probe
ttgttaatataccccaaattgtgta

SEQ ID NO: 301760 - DNA, 25 bp, probe
ttgatttattacttcccaatatttc

SEQ ID NO: 301761 - DNA, 25 bp, probe
ttgacttagattttacctgttactc

SEQ ID NO: 301762 - DNA, 25 bp, probe
ttgacttagattttacctgttactc

SEQ ID NO: 301763 - DNA, 25 bp, probe
ttggcatttaagttccccttagcac

SEQ ID NO: 301764 - DNA, 25 bp, probe
ttgagtttagagttcccttctgggt

SEQ ID NO: 301765 - DNA, 25 bp, probe
ttgaattcagtgcatttcctcttga

SEQ ID NO: 301766 - DNA, 25 bp, probe
ttgatatccggttttatatgtatga

SEQ ID NO: 301767 - DNA, 25 bp, probe
ttggagctaggatgtatggtgtagg

SEQ ID NO: 301768 - DNA, 25 bp, probe
ttgagagctgagactagtcatgtct

SEQ ID NO: 301769 - DNA, 25 bp, probe
ttgaagctgggctgattttcttgta

SEQ ID NO: 301770 - DNA, 25 bp, probe
ttgatactggaaactcttcctttaa

SEQ ID NO: 301771 - DNA, 25 bp, probe
ttgatttggatgattaggtctttaa

SEQ ID NO: 301772 - DNA, 25 bp, probe
ttgctgtttggtgtaggtaaatcta

SEQ ID NO: 301773 - DNA, 25 bp, probe
ttgctgtttggtgtaggtaaatcta

SEQ ID NO: 301774 - DNA, 25 bp, probe
ttgctttgtattgtagtaaccaata

SEQ ID NO: 301775 - DNA, 25 bp, probe
ttgtttgtacggaccataaatataa

SEQ ID NO: 301776 - DNA, 25 bp, probe
ttgttttcacatggaccaaaagatg

SEQ ID NO: 301777 - DNA, 25 bp, probe
ttgtagactccaggatacaaaccat

SEQ ID NO: 301778 - DNA, 25 bp, probe
ttgtagactccaggatacaaaccat

SEQ ID NO: 301779 - DNA, 25 bp, probe
ttgtacctccataaaacagtagcac

SEQ ID NO: 301780 - DNA, 25 bp, probe
ttggataaactgaacaacttcagcc

SEQ ID NO: 301781 - DNA, 25 bp, probe
ttgttactactatcaactgtcatcg

SEQ ID NO: 301782 - DNA, 25 bp, probe
ttgttaccattataaccctacagag

SEQ ID NO: 301783 - DNA, 25 bp, probe
ttgactggcttctaaaaccctgcca

SEQ ID NO: 301784 - DNA, 25 bp, probe
ttgactggaattgctgctacccagc

SEQ ID NO: 301785 - DNA, 25 bp, probe
ttgactggaattgctgctacccagc

SEQ ID NO: 301786 - DNA, 25 bp, probe
ttgatcatcaggagcctgtactgcc

SEQ ID NO: 301787 - DNA, 25 bp, probe
ttgattcagtggagcctggcagcct

SEQ ID NO: 301788 - DNA, 25 bp, probe
ttgattcagtggagcctggcagcct

SEQ ID NO: 301789 - DNA, 25 bp, probe
ttgaccactatgtgcacttcagctc

SEQ ID NO: 301790 - DNA, 25 bp, probe
ttgcaccctagttatcgctgagact

SEQ ID NO: 301791 - DNA, 25 bp, probe
ttgcctcctaatgacgcggctcaaa

SEQ ID NO: 301792 - DNA, 25 bp, probe
ttgcaccctacagtgggcctgtgca

SEQ ID NO: 301793 - DNA, 25 bp, probe
ttgacaggtacatggccggctgcaa

SEQ ID NO: 301794 - DNA, 25 bp, probe
ttgacaggtacatggccggctgcaa

SEQ ID NO: 301795 - DNA, 25 bp, probe
ttgaagcgggcactgaggcggagca

SEQ ID NO: 301796 - DNA, 25 bp, probe
ttggagccgacacgggagtaccaga

SEQ ID NO: 301797 - DNA, 25 bp, probe
ttggcactggaagggtagttctgga

SEQ ID NO: 301798 - DNA, 25 bp, probe
ttgcctttgaagggtatgtcacaag

SEQ ID NO: 301799 - DNA, 25 bp, probe
ttgcgtttgaggtagttgtgcctga

SEQ ID NO: 301800 - DNA, 25 bp, probe
ttggttacaggacttctgtgcattg

SEQ ID NO: 301801 - DNA, 25 bp, probe
ttgcctaaaggactatatacatcta

SEQ ID NO: 301802 - DNA, 25 bp, probe
ttgcctaaatggagtataccttgta

SEQ ID NO: 301803 - DNA, 25 bp, probe
ttgacataaatgcggtaccctttac

SEQ ID NO: 301804 - DNA, 25 bp, probe
ttgacataaatgcggtaccctttac

SEQ ID NO: 301805 - DNA, 25 bp, probe
ttgagtgcaaatacaggtactgttg

SEQ ID NO: 301806 - DNA, 25 bp, probe
ttgactggtgaatgcgtacatgtag

SEQ ID NO: 301807 - DNA, 25 bp, probe
ttgactgggcataaagtagctgtga

SEQ ID NO: 301808 - DNA, 25 bp, probe
ttgcaataagcatcaagttcaatga

SEQ ID NO: 301809 - DNA, 25 bp, probe
ttgcaataagcatcaagttcaatga

SEQ ID NO: 301810 - DNA, 25 bp, probe
ttgcaaaatatgttatgtctccaga

SEQ ID NO: 301811 - DNA, 25 bp, probe
ttgcataaaagtttatctgtgcata

SEQ ID NO: 301812 - DNA, 25 bp, probe
ttgaatgtaaatgtacatgtgcaga

SEQ ID NO: 301813 - DNA, 25 bp, probe
ttggttagctatgcaaagtcatgag

SEQ ID NO: 301814 - DNA, 25 bp, probe
ttgagtttgctgtgaagttcaatgc

SEQ ID NO: 301815 - DNA, 25 bp, probe
ttgatgttagcgtataaattagtgt

SEQ ID NO: 301816 - DNA, 25 bp, probe
ttgatatctcggatacaatagaggc

SEQ ID NO: 301817 - DNA, 25 bp, probe
ttgacctctggttcagccaaggacc

SEQ ID NO: 301818 - DNA, 25 bp, probe
ttgtccctgcagtgcccataggccc

SEQ ID NO: 301819 - DNA, 25 bp, probe
ttgtccagtggagcccaacttctaa

SEQ ID NO: 301820 - DNA, 25 bp, probe
ttgaccaggctggtctcgaactctt

SEQ ID NO: 301821 - DNA, 25 bp, probe
ttgactcatgcgcagtctcagtcac

SEQ ID NO: 301822 - DNA, 25 bp, probe
ttgagctcagcatgacttgaatgtc

SEQ ID NO: 301823 - DNA, 25 bp, probe
ttgcatctcgttgctggcagagtcc

SEQ ID NO: 301824 - DNA, 25 bp, probe
ttgcatagattccctgagcaggatt

SEQ ID NO: 301825 - DNA, 25 bp, probe
ttgcatcagactctctaaggactgg

SEQ ID NO: 301826 - DNA, 25 bp, probe
ttgctcatgactcctgtagggaagt

SEQ ID NO: 301827 - DNA, 25 bp, probe
ttgctcatgaccgacaagggttgtg

SEQ ID NO: 301828 - DNA, 25 bp, probe
ttgtcatgtcccacagggtctgttc

SEQ ID NO: 301829 - DNA, 25 bp, probe
ttgcccatcttcacatggagattgt

SEQ ID NO: 301830 - DNA, 25 bp, probe
ttgcccatcttcacatggagattgt

SEQ ID NO: 301831 - DNA, 25 bp, probe
ttgccaattccactcattacatatg

SEQ ID NO: 301832 - DNA, 25 bp, probe
ttgccaattccactcattacatatg

SEQ ID NO: 301833 - DNA, 25 bp, probe
ttgccaattccactcattacatatg

SEQ ID NO: 301834 - DNA, 25 bp, probe
ttgctatagtacttctgtaaagaga

SEQ ID NO: 301835 - DNA, 25 bp, probe
ttgctttgtggaggcatgtaataag

SEQ ID NO: 301836 - DNA, 25 bp, probe
ttgctttgtggaggcatgtaataag

SEQ ID NO: 301837 - DNA, 25 bp, probe
ttgcattttccagtgcctaatgaaa

SEQ ID NO: 301838 - DNA, 25 bp, probe
ttgatttacggcgctaaggatgact

SEQ ID NO: 301839 - DNA, 25 bp, probe
ttgttctgccccacttagtgatgaa

SEQ ID NO: 301840 - DNA, 25 bp, probe
ttgttcccatccagccgatgaagga

SEQ ID NO: 301841 - DNA, 25 bp, probe
ttgcttctattccttccaatgagag

SEQ ID NO: 301842 - DNA, 25 bp, probe
ttgcttttttcccatccatagagca

SEQ ID NO: 301843 - DNA, 25 bp, probe
ttgactattttgacgtccaggacta

SEQ ID NO: 301844 - DNA, 25 bp, probe
ttgacttctttgagacagagggcaa

SEQ ID NO: 301845 - DNA, 25 bp, probe
ttgactacttacagagcgtcctgga

SEQ ID NO: 301846 - DNA, 25 bp, probe
ttgactacttacagagcgtcctgga

SEQ ID NO: 301847 - DNA, 25 bp, probe
ttgaccattttgaggctgtcctcct

SEQ ID NO: 301848 - DNA, 25 bp, probe
ttgaacacttgacggttgtcccttt

SEQ ID NO: 301849 - DNA, 25 bp, probe
ttgtaccttaagcatttcccagctg

SEQ ID NO: 301850 - DNA, 25 bp, probe
ttgatcgcctacaagaagttcccca

SEQ ID NO: 301851 - DNA, 25 bp, probe
ttgatcccaaggcatatttctccta

SEQ ID NO: 301852 - DNA, 25 bp, probe
ttgaccattaatgtcatgttcattt

SEQ ID NO: 301853 - DNA, 25 bp, probe
ttgccacagtaaactatttcactaa

SEQ ID NO: 301854 - DNA, 25 bp, probe
ttgcccatgatatgtattttactta

SEQ ID NO: 301855 - DNA, 25 bp, probe
ttgccagcttgattgcagctttttt

SEQ ID NO: 301856 - DNA, 25 bp, probe
ttgccagtatataagctgtttagtt

SEQ ID NO: 301857 - DNA, 25 bp, probe
ttgccagtatataagctgtttagtt

SEQ ID NO: 301858 - DNA, 25 bp, probe
ttgaatgagaaacgtgtttagtatc

SEQ ID NO: 301859 - DNA, 25 bp, probe
ttggcagtgtaacatttctagatac

SEQ ID NO: 301860 - DNA, 25 bp, probe
ttgtagtttatgtacttcttgatac

SEQ ID NO: 301861 - DNA, 25 bp, probe
ttgtacttctgttagttcaccaaaa

SEQ ID NO: 301862 - DNA, 25 bp, probe
ttgtacttcatggtgactggcacca

SEQ ID NO: 301863 - DNA, 25 bp, probe
ttgatgacttcaggatctcaggagt

SEQ ID NO: 301864 - DNA, 25 bp, probe
ttgttgctgtagatgtgcgtgcagt

SEQ ID NO: 301865 - DNA, 25 bp, probe
ttgcatttctagcgagctggcgtgg

SEQ ID NO: 301866 - DNA, 25 bp, probe
ttgcctgtcttgctgtctagggatg

SEQ ID NO: 301867 - DNA, 25 bp, probe
ttgcctggattccttatgcagtggt

SEQ ID NO: 301868 - DNA, 25 bp, probe
ttgcctggattccttatgcagtggt

SEQ ID NO: 301869 - DNA, 25 bp, probe
ttgactgtgcttaccaatgagtggt

SEQ ID NO: 301870 - DNA, 25 bp, probe
ttgacatttatcacctctgatggct

SEQ ID NO: 301871 - DNA, 25 bp, probe
ttgaatgatttcccactcagggcct

SEQ ID NO: 301872 - DNA, 25 bp, probe
ttgcaaatatcaggctcccagggtt

SEQ ID NO: 301873 - DNA, 25 bp, probe
ttgcaaatatcaggctcccagggtt

SEQ ID NO: 301874 - DNA, 25 bp, probe
ttgcacagaacgcccgggggctgag

SEQ ID NO: 301875 - DNA, 25 bp, probe
ttgcactttgagcccgtggggtgag

SEQ ID NO: 301876 - DNA, 25 bp, probe
ttgagcttgtggaggtggtcggcaa

SEQ ID NO: 301877 - DNA, 25 bp, probe
ttgagttgtgcgtgggggacccaga

SEQ ID NO: 301878 - DNA, 25 bp, probe
ttgctctgtttgtggggtgacggga

SEQ ID NO: 301879 - DNA, 25 bp, probe
ttgtatgacttctgctgaaggacag

SEQ ID NO: 301880 - DNA, 25 bp, probe
ttgtggatcttctagaatcttacag

SEQ ID NO: 301881 - DNA, 25 bp, probe
ttgcaggatttgtcagtctctttag

SEQ ID NO: 301882 - DNA, 25 bp, probe
ttgctggatcttgagtcccattagc

SEQ ID NO: 301883 - DNA, 25 bp, probe
ttgctgtgtcttgggaacctgtgat

SEQ ID NO: 301884 - DNA, 25 bp, probe
ttgctctgcatgtggtaacttgtgt

SEQ ID NO: 301885 - DNA, 25 bp, probe
ttgcattgcagaaggtgttcctttc

SEQ ID NO: 301886 - DNA, 25 bp, probe
ttgcattgcagaaggtgttcctttc

SEQ ID NO: 301887 - DNA, 25 bp, probe
ttgaatgcggcgcagtgctccatgc

SEQ ID NO: 301888 - DNA, 25 bp, probe
ttgaatgcggcgcagtgctccatgc

SEQ ID NO: 301889 - DNA, 25 bp, probe
ttgaagggctgagtggcctgctggg

SEQ ID NO: 301890 - DNA, 25 bp, probe
ttgaagaatccatgtccctggtgaa

SEQ ID NO: 301891 - DNA, 25 bp, probe
ttgaatatattcagtccttcttgga

SEQ ID NO: 301892 - DNA, 25 bp, probe
ttggaatgaattatcctgccttgga

SEQ ID NO: 301893 - DNA, 25 bp, probe
ttgtggagagattccttcctcggga

SEQ ID NO: 301894 - DNA, 25 bp, probe
ttgaggtgaaagcttcgtccgagaa

SEQ ID NO: 301895 - DNA, 25 bp, probe
ttggcagtgcaaagcagttggtccg

SEQ ID NO: 301896 - DNA, 25 bp, probe
ttccaatcagatgcagctttctcct

SEQ ID NO: 301897 - DNA, 25 bp, probe
ttgccaatgattgcctctgattctt

SEQ ID NO: 301898 - DNA, 25 bp, probe
ttgccaatgattgcctctgattctt

SEQ ID NO: 301899 - DNA, 25 bp, probe
ttgtgcagagttgtttgagtcattt

SEQ ID NO: 301900 - DNA, 25 bp, probe
ttgtgaagtttaattgacttattta

SEQ ID NO: 301901 - DNA, 25 bp, probe
ttgcaaagtgttgtcttattcctaa

SEQ ID NO: 301902 - DNA, 25 bp, probe
ttgcaaaattatctccagacttcta

SEQ ID NO: 301903 - DNA, 25 bp, probe
ttgattgaactatcccagatggtta

SEQ ID NO: 301904 - DNA, 25 bp, probe
ttgttggcctgaagatgccccgtta

SEQ ID NO: 301905 - DNA, 25 bp, probe
ttgttggcctgaagatgccccgtta

SEQ ID NO: 301906 - DNA, 25 bp, probe
ttgttggcctgaagatgccccgtta

SEQ ID NO: 301907 - DNA, 25 bp, probe
ttggaggccataaggccagccagtt

SEQ ID NO: 301908 - DNA, 25 bp, probe
ttgtggtggaacagcaaccggtgcc

SEQ ID NO: 301909 - DNA, 25 bp, probe
ttggggtcatagatgtttccttgcc

SEQ ID NO: 301910 - DNA, 25 bp, probe
ttgaggtgctttatgtggtccccac

SEQ ID NO: 301911 - DNA, 25 bp, probe
ttgatggtgttccaagggtccctga

SEQ ID NO: 301912 - DNA, 25 bp, probe
ttgctgggtacgtgactatccctaa

SEQ ID NO: 301913 - DNA, 25 bp, probe
ttgatgaggtcatgaagactaccaa

SEQ ID NO: 301914 - DNA, 25 bp, probe
ttgatacgacaccgcatggcttcga

SEQ ID NO: 301915 - DNA, 25 bp, probe
ttgagacggaacaggctctgcgcat

SEQ ID NO: 301916 - DNA, 25 bp, probe
ttgcaaaagaagaggtctccctcaa

SEQ ID NO: 301917 - DNA, 25 bp, probe
ttgaaacagcagcagggctcatcca

SEQ ID NO: 301918 - DNA, 25 bp, probe
ttgaaagctctgctgttgtctcacc

SEQ ID NO: 301919 - DNA, 25 bp, probe
ttgaagacttttctttcagccaaga

SEQ ID NO: 301920 - DNA, 25 bp, probe
ttgaagacttttctttcagccaaga

SEQ ID NO: 301921 - DNA, 25 bp, probe
ttgaaactgtatcacctttgccaag

SEQ ID NO: 301922 - DNA, 25 bp, probe
ttgcgaactggtgacctgtaggcca

SEQ ID NO: 301923 - DNA, 25 bp, probe
ttgtgaactgcagggacgcggggca

SEQ ID NO: 301924 - DNA, 25 bp, probe
ttggggtggaggtcagggtggaggg

SEQ ID NO: 301925 - DNA, 25 bp, probe
ttgtgggaggggacggggagtgagg

SEQ ID NO: 301926 - DNA, 25 bp, probe
ttgtgggtggggcttgggagatggg

SEQ ID NO: 301927 - DNA, 25 bp, probe
ttggggtagtgaagtatgggaaatg

SEQ ID NO: 301928 - DNA, 25 bp, probe
ttgggtgatcaagggtgtggttagt

SEQ ID NO: 301929 - DNA, 25 bp, probe
ttggccattgcttggggggattatg

SEQ ID NO: 301930 - DNA, 25 bp, probe
ttggcagattcctggggtgaatgca

SEQ ID NO: 301931 - DNA, 25 bp, probe
ttgcctttggcatcggattgactcc

SEQ ID NO: 301932 - DNA, 25 bp, probe
ttgccttgttgatgtggacatgagc

SEQ ID NO: 301933 - DNA, 25 bp, probe
ttgacctttctgttgggcatgacat

SEQ ID NO: 301934 - DNA, 25 bp, probe
ttgacccataggcagaggcatgagc

SEQ ID NO: 301935 - DNA, 25 bp, probe
ttgacaacatgaccatggaagctga

SEQ ID NO: 301936 - DNA, 25 bp, probe
ttggcaacgtgcctgagcaccgaac

SEQ ID NO: 301937 - DNA, 25 bp, probe
ttggaccggcgcaagacggaccaga

SEQ ID NO: 301938 - DNA, 25 bp, probe
ttggagcctggggtattgtcaccga

SEQ ID NO: 301939 - DNA, 25 bp, probe
ttgggcctaggctgcattgaaaaga

SEQ ID NO: 301940 - DNA, 25 bp, probe
ttgggcctaggctgcattgaaaaga

SEQ ID NO: 301941 - DNA, 25 bp, probe
ttgggcctaggcagttggacgataa

SEQ ID NO: 301942 - DNA, 25 bp, probe
ttggagtgctaatgtttgagacgat

SEQ ID NO: 301943 - DNA, 25 bp, probe
ttgaggatgtgatgagtttagggat

SEQ ID NO: 301944 - DNA, 25 bp, probe
ttgtggatgtgatgggcggcctgga

SEQ ID NO: 301945 - DNA, 25 bp, probe
ttgtggatggacagccacgccaggc

SEQ ID NO: 301946 - DNA, 25 bp, probe
ttgctgggtgagggcacaccactgc

SEQ ID NO: 301947 - DNA, 25 bp, probe
ttgctgggtgagggcacaccactgc

SEQ ID NO: 301948 - DNA, 25 bp, probe
ttgagggcgagttcacagggctgcc

SEQ ID NO: 301949 - DNA, 25 bp, probe
ttgagggcgagttcacagggctgcc

SEQ ID NO: 301950 - DNA, 25 bp, probe
ttgaggtgtaatgaaggcttgtctt

SEQ ID NO: 301951 - DNA, 25 bp, probe
ttgcggcggaatcacaggctgatta

SEQ ID NO: 301952 - DNA, 25 bp, probe
ttgcacgggactggacatggtgttg

SEQ ID NO: 301953 - DNA, 25 bp, probe
ttgagaggggctgacatggacatag

SEQ ID NO: 301954 - DNA, 25 bp, probe
ttgcagcaacctgtgacaggatcaa

SEQ ID NO: 301955 - DNA, 25 bp, probe
ttgaacagcgtcttgcctgtgatca

SEQ ID NO: 301956 - DNA, 25 bp, probe
ttgctgtgatggcctgttgctgggc

SEQ ID NO: 301957 - DNA, 25 bp, probe
ttgcgtatgattcaatcggccaccc

SEQ ID NO: 301958 - DNA, 25 bp, probe
ttgctgtcgattaagaccggagctt

SEQ ID NO: 301959 - DNA, 25 bp, probe
ttgcttccaaaattgccaatgagct

SEQ ID NO: 301960 - DNA, 25 bp, probe
ttgtctactattttgccagtgacta

SEQ ID NO: 301961 - DNA, 25 bp, probe
ttgatcggtatttggctgttgtcta

SEQ ID NO: 301962 - DNA, 25 bp, probe
ttgatgctgataatttgaccgttta

SEQ ID NO: 301963 - DNA, 25 bp, probe
ttgactctctttaacctgtttgcaa

SEQ ID NO: 301964 - DNA, 25 bp, probe
ttgcagttcttacaccgtttggtga

SEQ ID NO: 301965 - DNA, 25 bp, probe
ttggttttcagttgtaatttggtat

SEQ ID NO: 301966 - DNA, 25 bp, probe
ttggctttactatgtacactgaggt

SEQ ID NO: 301967 - DNA, 25 bp, probe
ttgccttgtaattcgacagctctac

SEQ ID NO: 301968 - DNA, 25 bp, probe
ttgcctcatgtcaaactgaaataag

SEQ ID NO: 301969 - DNA, 25 bp, probe
ttgcctctggtctctgaaaagctgg

SEQ ID NO: 301970 - DNA, 25 bp, probe
ttgtcctgactctgtgtataagctg

SEQ ID NO: 301971 - DNA, 25 bp, probe
ttgtcctgactctgtgtataagctg

SEQ ID NO: 301972 - DNA, 25 bp, probe
ttgctcctctcaacatgggtacagc

SEQ ID NO: 301973 - DNA, 25 bp, probe
ttgcctctcataccaggaagccaca

SEQ ID NO: 301974 - DNA, 25 bp, probe
ttgcaatagcaaccataactgccac

SEQ ID NO: 301975 - DNA, 25 bp, probe
ttgcaaagagcagctacctggcaac

SEQ ID NO: 301976 - DNA, 25 bp, probe
ttgcaaggaccctctgatgggacgg

SEQ ID NO: 301977 - DNA, 25 bp, probe
ttgcaaaggacctcaggggacaggt

SEQ ID NO: 301978 - DNA, 25 bp, probe
ttgcaaaggacctcaggggacaggt

SEQ ID NO: 301979 - DNA, 25 bp, probe
ttgaccaggacctcatggtggcaca

SEQ ID NO: 301980 - DNA, 25 bp, probe
ttgacaagaaccatcaagttccaac

SEQ ID NO: 301981 - DNA, 25 bp, probe
ttgaaaactccactatagttcatca

SEQ ID NO: 301982 - DNA, 25 bp, probe
ttgaataatccttgttagagttatc

SEQ ID NO: 301983 - DNA, 25 bp, probe
ttgaagatatcccgttagaagaacc

SEQ ID NO: 301984 - DNA, 25 bp, probe
ttgaacagttggctgtatgactgaa

SEQ ID NO: 301985 - DNA, 25 bp, probe
ttgaaagtgggcatgctaagggcaa

SEQ ID NO: 301986 - DNA, 25 bp, probe
ttgagaagggccgagtaaagtgtga

SEQ ID NO: 301987 - DNA, 25 bp, probe
ttggaactgtccgagaaagcagtgc

SEQ ID NO: 301988 - DNA, 25 bp, probe
ttgatgactcagaccctgaaactgg

SEQ ID NO: 301989 - DNA, 25 bp, probe
ttgcagcaattcactgtaaagctgg

SEQ ID NO: 301990 - DNA, 25 bp, probe
ttgagaatatctatgatttacagag

SEQ ID NO: 301991 - DNA, 25 bp, probe
ttgatgaagttctgcttgacctgag

SEQ ID NO: 301992 - DNA, 25 bp, probe
ttgctggatgtttggtctgaaagag

SEQ ID NO: 301993 - DNA, 25 bp, probe
ttgctggctggtgggttgcaagaaa

SEQ ID NO: 301994 - DNA, 25 bp, probe
ttgctgccggagcgttacatcaaac

SEQ ID NO: 301995 - DNA, 25 bp, probe
ttgcagcgcgggcgttggaagaact

SEQ ID NO: 301996 - DNA, 25 bp, probe
ttgcctgtgtggcacaatggagaaa

SEQ ID NO: 301997 - DNA, 25 bp, probe
ttgcccatctagcactttggaaatc

SEQ ID NO: 301998 - DNA, 25 bp, probe
ttgcctcatctacaatttgagaaag

SEQ ID NO: 301999 - DNA, 25 bp, probe
ttgtgtactggccaagtcgagaaga

SEQ ID NO: 302000 - DNA, 25 bp, probe
ttgcttatttgccaaagctgggaga

SEQ ID NO: 302001 - DNA, 25 bp, probe
ttgctggtcctgcacatgagtggaa

SEQ ID NO: 302002 - DNA, 25 bp, probe
ttgaattcttggatgcagtggcaga

SEQ ID NO: 302003 - DNA, 25 bp, probe
ttgaattcacgagcatcgatgcaca

SEQ ID NO: 302004 - DNA, 25 bp, probe
ttgtcatgatcaccaacatcgagga

SEQ ID NO: 302005 - DNA, 25 bp, probe
ttgatgatgtcacctaccatggctt

SEQ ID NO: 302006 - DNA, 25 bp, probe
ttgctttcaccaagaatgtcctagg

SEQ ID NO: 302007 - DNA, 25 bp, probe
ttgattattaaatagtcactagtat

SEQ ID NO: 302008 - DNA, 25 bp, probe
ttgttgataaattaaatgacttgaa

SEQ ID NO: 302009 - DNA, 25 bp, probe
ttgtagcatcaactagaataatcta

SEQ ID NO: 302010 - DNA, 25 bp, probe
ttgctatccattaagaagacattga

SEQ ID NO: 302011 - DNA, 25 bp, probe
ttgaatccatttatcaagctatgac

SEQ ID NO: 302012 - DNA, 25 bp, probe
ttgaatacatttatccagtcccggg

SEQ ID NO: 302013 - DNA, 25 bp, probe
ttgagataatttaaccctgcctctc

SEQ ID NO: 302014 - DNA, 25 bp, probe
ttgaaaattgtgatctcattccttt

SEQ ID NO: 302015 - DNA, 25 bp, probe
ttgaaaattgtgatctcattccttt

SEQ ID NO: 302016 - DNA, 25 bp, probe
ttgagaagatggccccttgtgcctt

SEQ ID NO: 302017 - DNA, 25 bp, probe
ttgagaacatggccggggtcttcat

SEQ ID NO: 302018 - DNA, 25 bp, probe
ttggaatatgcccgttggtctatga

SEQ ID NO: 302019 - DNA, 25 bp, probe
ttggactagcaatttatgcttcttg

SEQ ID NO: 302020 - DNA, 25 bp, probe
ttgtcctcagaatccatattgtgtg

SEQ ID NO: 302021 - DNA, 25 bp, probe
ttgtcaccaagaaccagcatctctg

SEQ ID NO: 302022 - DNA, 25 bp, probe
ttgtcacccatctacaggattgtcc

SEQ ID NO: 302023 - DNA, 25 bp, probe
ttgctcaacgacatcgtgattctcc

SEQ ID NO: 302024 - DNA, 25 bp, probe
ttgctaacatagaccagtctgattt

SEQ ID NO: 302025 - DNA, 25 bp, probe
ttgctaaatctgggagtcattttct

SEQ ID NO: 302026 - DNA, 25 bp, probe
ttgctaagtctgctaatcttctgtg

SEQ ID NO: 302027 - DNA, 25 bp, probe
ttgttgagtctgccattcgtagctg

SEQ ID NO: 302028 - DNA, 25 bp, probe
ttgctgtatgtctcgtggtaggact

SEQ ID NO: 302029 - DNA, 25 bp, probe
ttgatccatgtctgtttgtaggacg

SEQ ID NO: 302030 - DNA, 25 bp, probe
ttgacgactttgactgtgatctgga

SEQ ID NO: 302031 - DNA, 25 bp, probe
ttgaccatgttgcactgtttgcatg

SEQ ID NO: 302032 - DNA, 25 bp, probe
ttgaaattctggcttgggatgctga

SEQ ID NO: 302033 - DNA, 25 bp, probe
ttgaaatttgtcatggatggagggt

SEQ ID NO: 302034 - DNA, 25 bp, probe
ttgatatcacctacacggagggtgg

SEQ ID NO: 302035 - DNA, 25 bp, probe
ttgattcatcctactcactggggaa

SEQ ID NO: 302036 - DNA, 25 bp, probe
ttgtccatgccaaccagagggtacc

SEQ ID NO: 302037 - DNA, 25 bp, probe
ttgaccatgagcaccatagcaccat

SEQ ID NO: 302038 - DNA, 25 bp, probe
ttgacttcatcggccaagtccataa

SEQ ID NO: 302039 - DNA, 25 bp, probe
ttgaccgcattggcaaaggctcatt

SEQ ID NO: 302040 - DNA, 25 bp, probe
ttgagcaaattgaaaagcctatatc

SEQ ID NO: 302041 - DNA, 25 bp, probe
ttgacaactttatcagccagactgc

SEQ ID NO: 302042 - DNA, 25 bp, probe
ttgaacagcttggaacaccatgtcc

SEQ ID NO: 302043 - DNA, 25 bp, probe
ttgaacagcattgtaaaatggcaca

SEQ ID NO: 302044 - DNA, 25 bp, probe
ttgaccactcttcagagaatggata

SEQ ID NO: 302045 - DNA, 25 bp, probe
ttgtcgcctttcctgggtgacaatg

SEQ ID NO: 302046 - DNA, 25 bp, probe
ttgactgctctgtttgggtgggaga

SEQ ID NO: 302047 - DNA, 25 bp, probe
ttggaggcagtttcgagtgggcgga

SEQ ID NO: 302048 - DNA, 25 bp, probe
ttgggatactgttctgggggaggca

SEQ ID NO: 302049 - DNA, 25 bp, probe
ttgttatgactgttttgagagtggg

SEQ ID NO: 302050 - DNA, 25 bp, probe
ttgtcaaggcgagtgaggacgggga

SEQ ID NO: 302051 - DNA, 25 bp, probe
ttgtatatggtgtgaggtgggagga

SEQ ID NO: 302052 - DNA, 25 bp, probe
ttgtccatagtttgagggcagaagg

SEQ ID NO: 302053 - DNA, 25 bp, probe
ttggcctgcttgtctggcggagaaa

SEQ ID NO: 302054 - DNA, 25 bp, probe
ttgatcatgctgttgctcatggcga

SEQ ID NO: 302055 - DNA, 25 bp, probe
ttgactgctggtccatcggagtgat

SEQ ID NO: 302056 - DNA, 25 bp, probe
ttgatctcctgacatcgtgatctgt

SEQ ID NO: 302057 - DNA, 25 bp, probe
ttgactctgcaaaatcatgcttttt

SEQ ID NO: 302058 - DNA, 25 bp, probe
ttgactcttaaaatctatgttctct

SEQ ID NO: 302059 - DNA, 25 bp, probe
ttgcctcctagtatcgatgcagttt

SEQ ID NO: 302060 - DNA, 25 bp, probe
ttgaccacacagtattagatgagtt

SEQ ID NO: 302061 - DNA, 25 bp, probe
ttgtgcgcacacttgatgaaggtgt

SEQ ID NO: 302062 - DNA, 25 bp, probe
ttgctcaatatcttgtactgtgtga

SEQ ID NO: 302063 - DNA, 25 bp, probe
ttgctcaatatcttgtactgtgtga

SEQ ID NO: 302064 - DNA, 25 bp, probe
ttgctattctcagatgactctgtgt

SEQ ID NO: 302065 - DNA, 25 bp, probe
ttgctaggcagcaactatctgcttt

SEQ ID NO: 302066 - DNA, 25 bp, probe
ttgctagcaggcaatctccatttct

SEQ ID NO: 302067 - DNA, 25 bp, probe
ttgtatgagctgcattgcccttgct

SEQ ID NO: 302068 - DNA, 25 bp, probe
ttgctgatggtgcaatgacctttca

SEQ ID NO: 302069 - DNA, 25 bp, probe
ttgagatggattaatggcctttgca

SEQ ID NO: 302070 - DNA, 25 bp, probe
ttgagatggattaatggcctttgca

SEQ ID NO: 302071 - DNA, 25 bp, probe
ttgactaataaaccctttgatactt

SEQ ID NO: 302072 - DNA, 25 bp, probe
ttgacaaagtcagcccctatgggtt

SEQ ID NO: 302073 - DNA, 25 bp, probe
ttggccaagcatttcccacttggcg

SEQ ID NO: 302074 - DNA, 25 bp, probe
ttggcccagtgtggacgcactgtgg

SEQ ID NO: 302075 - DNA, 25 bp, probe
ttgtccgcaatggagcatgtgcact

SEQ ID NO: 302076 - DNA, 25 bp, probe
ttgatcctgccagtagcatatgctt

SEQ ID NO: 302077 - DNA, 25 bp, probe
ttgtcactgtcatcagaatctgtcg

SEQ ID NO: 302078 - DNA, 25 bp, probe
ttgtcacattcataatgctgatact

SEQ ID NO: 302079 - DNA, 25 bp, probe
ttgtcacattcataatgctgatact

SEQ ID NO: 302080 - DNA, 25 bp, probe
ttgcctctggcatgaagtacctttc

SEQ ID NO: 302081 - DNA, 25 bp, probe
ttgcctctggcatgaagtacctttc

SEQ ID NO: 302082 - DNA, 25 bp, probe
ttgtctcataatcaaatatcgcttt

SEQ ID NO: 302083 - DNA, 25 bp, probe
ttgttcaattgttaatgtcacttta

SEQ ID NO: 302084 - DNA, 25 bp, probe
ttgtcataattgttaaggtgttcta

SEQ ID NO: 302085 - DNA, 25 bp, probe
ttgactacattgctgattggtgtta

SEQ ID NO: 302086 - DNA, 25 bp, probe
ttgcctgtttcggatctgtggttcc

SEQ ID NO: 302087 - DNA, 25 bp, probe
ttggcagtttctaacttgtgtttct

SEQ ID NO: 302088 - DNA, 25 bp, probe
ttgctgctgttcatgtacttttcat

SEQ ID NO: 302089 - DNA, 25 bp, probe
ttgctgctgtccatggtagtcagta

SEQ ID NO: 302090 - DNA, 25 bp, probe
ttgctgctgtttcatgtggactgaa

SEQ ID NO: 302091 - DNA, 25 bp, probe
ttgctgctggtaatttgtatctgaa

SEQ ID NO: 302092 - DNA, 25 bp, probe
ttgttgatgtcgtatcttatgctgc

SEQ ID NO: 302093 - DNA, 25 bp, probe
ttgctgttgctctgatgtttgctca

SEQ ID NO: 302094 - DNA, 25 bp, probe
ttgctgctaccaactttggtaggga

SEQ ID NO: 302095 - DNA, 25 bp, probe
ttgtgctgacctctgatatggcata

SEQ ID NO: 302096 - DNA, 25 bp, probe
ttgtgctggcctttgagttcatgct

SEQ ID NO: 302097 - DNA, 25 bp, probe
ttgtgctggcctttgagttcatgct

SEQ ID NO: 302098 - DNA, 25 bp, probe
ttgcctgacacttggatttacttct

SEQ ID NO: 302099 - DNA, 25 bp, probe
ttggcaacagtatgatttgcctgtt

SEQ ID NO: 302100 - DNA, 25 bp, probe
ttgcagacaagatagatttccccag

SEQ ID NO: 302101 - DNA, 25 bp, probe
ttgctgcaaagttaattcacccaca

SEQ ID NO: 302102 - DNA, 25 bp, probe
ttgctcacaagcagatttccccagc

SEQ ID NO: 302103 - DNA, 25 bp, probe
ttgctgccaacaagtttgtgcaccg

SEQ ID NO: 302104 - DNA, 25 bp, probe
ttgtccagcgtgacttatgtaccca

SEQ ID NO: 302105 - DNA, 25 bp, probe
ttgtccacaatgatcaactacgccc

SEQ ID NO: 302106 - DNA, 25 bp, probe
ttgtccacagtggaaatctggagac

SEQ ID NO: 302107 - DNA, 25 bp, probe
ttgtggcgggtagactggagagtct

SEQ ID NO: 302108 - DNA, 25 bp, probe
ttgctgggggtgtcgagtgcggagc

SEQ ID NO: 302109 - DNA, 25 bp, probe
ttgtgtgggcagttgccagctgctg

SEQ ID NO: 302110 - DNA, 25 bp, probe
ttgtcggatgagtggcagctgctga

SEQ ID NO: 302111 - DNA, 25 bp, probe
ttgtcggatgagtggcagctgctga

SEQ ID NO: 302112 - DNA, 25 bp, probe
ttgactggggatggcgcatgcatgg

SEQ ID NO: 302113 - DNA, 25 bp, probe
ttgacatgtcggcgcagattgctga

SEQ ID NO: 302114 - DNA, 25 bp, probe
ttgacattccagcagaattctcagg

SEQ ID NO: 302115 - DNA, 25 bp, probe
ttgacattcacaccaaagctctgag

SEQ ID NO: 302116 - DNA, 25 bp, probe
ttgcagttgacttcaagacgctggc

SEQ ID NO: 302117 - DNA, 25 bp, probe
ttgcctcttctgtgagcactgtggc

SEQ ID NO: 302118 - DNA, 25 bp, probe
ttgccttcacagtggacaatggact

SEQ ID NO: 302119 - DNA, 25 bp, probe
ttgccattagatctagacaagaaca

SEQ ID NO: 302120 - DNA, 25 bp, probe
ttggctgtcagtctagaaatgggag

SEQ ID NO: 302121 - DNA, 25 bp, probe
ttgccgtcagcacaccaaagagata

SEQ ID NO: 302122 - DNA, 25 bp, probe
ttgctcgtccatccctcaagagaga

SEQ ID NO: 302123 - DNA, 25 bp, probe
ttgtctggctcacactggaagcagc

SEQ ID NO: 302124 - DNA, 25 bp, probe
ttgagatggctacagggaagcctcc

SEQ ID NO: 302125 - DNA, 25 bp, probe
ttgtggttccactggaagtctccag

SEQ ID NO: 302126 - DNA, 25 bp, probe
ttgttgctccgagagtgtttctcca

SEQ ID NO: 302127 - DNA, 25 bp, probe
ttgcttcctcagtaacatttctgtt

SEQ ID NO: 302128 - DNA, 25 bp, probe
ttgcttattcattatagctattcgt

SEQ ID NO: 302129 - DNA, 25 bp, probe
ttgctgtttcatctactgttgctgt

SEQ ID NO: 302130 - DNA, 25 bp, probe
ttgcatttgccacttcatttactgt

SEQ ID NO: 302131 - DNA, 25 bp, probe
ttgagttccaatccaaaactgtctc

SEQ ID NO: 302132 - DNA, 25 bp, probe
ttgagccctcttggaaagacttctc

SEQ ID NO: 302133 - DNA, 25 bp, probe
ttgagccctcttggaaagacttctc

SEQ ID NO: 302134 - DNA, 25 bp, probe
ttgacctgcttctgaaagtgccacc

SEQ ID NO: 302135 - DNA, 25 bp, probe
ttgatcacagctccaggaccagtgc

SEQ ID NO: 302136 - DNA, 25 bp, probe
ttggcatcagcaggaggcctcatgt

SEQ ID NO: 302137 - DNA, 25 bp, probe
ttgtgcatatgcttgacagctttga

SEQ ID NO: 302138 - DNA, 25 bp, probe
ttgatcatgtgcaatgccgtcattg

SEQ ID NO: 302139 - DNA, 25 bp, probe
ttgatcatgtgcaatgccgtcattg

SEQ ID NO: 302140 - DNA, 25 bp, probe
ttgcattgggaccagtcatttccta

SEQ ID NO: 302141 - DNA, 25 bp, probe
ttgcatctggatggcgggattttta

SEQ ID NO: 302142 - DNA, 25 bp, probe
ttgcctggatgcggtggtgcattgt

SEQ ID NO: 302143 - DNA, 25 bp, probe
ttgtcatggatggagggtatctgga

SEQ ID NO: 302144 - DNA, 25 bp, probe
ttgctcagtgcaaggtggagaagga

SEQ ID NO: 302145 - DNA, 25 bp, probe
ttgctcttgaaggctggcatgcaga

SEQ ID NO: 302146 - DNA, 25 bp, probe
ttgctcttgaaggctggcatgcaga

SEQ ID NO: 302147 - DNA, 25 bp, probe
ttgcataatcaatgctggctgataa

SEQ ID NO: 302148 - DNA, 25 bp, probe
ttgacagatccttgcggcaattaac

SEQ ID NO: 302149 - DNA, 25 bp, probe
ttgcaggatccgtctgtgcacatgc

SEQ ID NO: 302150 - DNA, 25 bp, probe
ttgaggctgccaattaccagcccca

SEQ ID NO: 302151 - DNA, 25 bp, probe
ttgacttgtcaattactaccctttc

SEQ ID NO: 302152 - DNA, 25 bp, probe
ttgacttgtcaattactaccctttc

SEQ ID NO: 302153 - DNA, 25 bp, probe
ttggccgaaatttctacacctgtgt

SEQ ID NO: 302154 - DNA, 25 bp, probe
ttggttgggcttttaatcctgtgtg

SEQ ID NO: 302155 - DNA, 25 bp, probe
ttggtgtgctggctttagacgggga

SEQ ID NO: 302156 - DNA, 25 bp, probe
ttggtgtgctggctttagacgggga

SEQ ID NO: 302157 - DNA, 25 bp, probe
ttgtggactggccgtttgacgatgg

SEQ ID NO: 302158 - DNA, 25 bp, probe
ttgtagaagatactagttgaggagg

SEQ ID NO: 302159 - DNA, 25 bp, probe
ttgaggacagaactagtgatgggag

SEQ ID NO: 302160 - DNA, 25 bp, probe
ttgtatgcaaccttagctgatgggg

SEQ ID NO: 302161 - DNA, 25 bp, probe
ttgttcacataggcctctgggagtg

SEQ ID NO: 302162 - DNA, 25 bp, probe
ttgtgtcaattggttcgtggcagga

SEQ ID NO: 302163 - DNA, 25 bp, probe
ttgtgtgcaaacttgtccggaggag

SEQ ID NO: 302164 - DNA, 25 bp, probe
ttgctgtaacacttgaccttaactt

SEQ ID NO: 302165 - DNA, 25 bp, probe
ttgctgttaacatttactatgatat

SEQ ID NO: 302166 - DNA, 25 bp, probe
ttgcagttattcgtaatgtcagata

SEQ ID NO: 302167 - DNA, 25 bp, probe
ttgcacttcaacatgtgattcagaa

SEQ ID NO: 302168 - DNA, 25 bp, probe
ttggctataaccagtctcagcaaga

SEQ ID NO: 302169 - DNA, 25 bp, probe
ttggcaacattctggatgtccctga

SEQ ID NO: 302170 - DNA, 25 bp, probe
ttggcacagaaatggttccctgagc

SEQ ID NO: 302171 - DNA, 25 bp, probe
ttggagaaaatacttcaaccagagc

SEQ ID NO: 302172 - DNA, 25 bp, probe
ttggacaaaaagacccacatccacc

SEQ ID NO: 302173 - DNA, 25 bp, probe
ttggcaaaaacagccttctagcaca

SEQ ID NO: 302174 - DNA, 25 bp, probe
ttggcaagccaagccccatgcttgc

SEQ ID NO: 302175 - DNA, 25 bp, probe
ttgctaactatatacccatctctga

SEQ ID NO: 302176 - DNA, 25 bp, probe
ttgctacctgtagtagcctgcctct

SEQ ID NO: 302177 - DNA, 25 bp, probe
ttgctactcttgtcagacaatggct

SEQ ID NO: 302178 - DNA, 25 bp, probe
ttgctcctgctctcagatcagatca

SEQ ID NO: 302179 - DNA, 25 bp, probe
ttgccctctcaatgatcaactctaa

SEQ ID NO: 302180 - DNA, 25 bp, probe
ttgcaccattaatgacagttgctaa

SEQ ID NO: 302181 - DNA, 25 bp, probe
ttgacacagtaattttgtttgatga

SEQ ID NO: 302182 - DNA, 25 bp, probe
ttgacaagtaccaggctttgatgga

SEQ ID NO: 302183 - DNA, 25 bp, probe
ttgaaggtactcaggtttcagagcc

SEQ ID NO: 302184 - DNA, 25 bp, probe
ttgaagttccacaggctaaagccca

SEQ ID NO: 302185 - DNA, 25 bp, probe
ttgaactctcccagcgcgagagacc

SEQ ID NO: 302186 - DNA, 25 bp, probe
ttgacactctcgctggtgaagccaa

SEQ ID NO: 302187 - DNA, 25 bp, probe
ttgacactctcgctggtgaagccaa

SEQ ID NO: 302188 - DNA, 25 bp, probe
ttgacactctcgctggtgaagccaa

SEQ ID NO: 302189 - DNA, 25 bp, probe
ttgaatagcttgcggccaggacaac

SEQ ID NO: 302190 - DNA, 25 bp, probe
ttgaaggtgtgttctccaggacagg

SEQ ID NO: 302191 - DNA, 25 bp, probe
ttgaggggtctgtttaggccaggcc

SEQ ID NO: 302192 - DNA, 25 bp, probe
ttgaaattgactttcgagcccaggc

SEQ ID NO: 302193 - DNA, 25 bp, probe
ttgtccttgacttgggagccacaga

SEQ ID NO: 302194 - DNA, 25 bp, probe
ttgctccttgttagtggctgcatca

SEQ ID NO: 302195 - DNA, 25 bp, probe
ttgccctgtgctatggtgtggccat

SEQ ID NO: 302196 - DNA, 25 bp, probe
ttgcacactggctggcattcggcaa

SEQ ID NO: 302197 - DNA, 25 bp, probe
ttgcagcacccatggattgcaggag

SEQ ID NO: 302198 - DNA, 25 bp, probe
ttgcatgcctccagcgatggggagc

SEQ ID NO: 302199 - DNA, 25 bp, probe
ttgcagcagtctaagtgcccggaca

SEQ ID NO: 302200 - DNA, 25 bp, probe
ttgacatgctgtattccacgaggca

SEQ ID NO: 302201 - DNA, 25 bp, probe
ttgtcagcagccattgccacgaaga

SEQ ID NO: 302202 - DNA, 25 bp, probe
ttggcagcagcacatctaacgagta

SEQ ID NO: 302203 - DNA, 25 bp, probe
ttgagcacaacgtatctcctggcta

SEQ ID NO: 302204 - DNA, 25 bp, probe
ttgagcacaacgtatctcctggcta

SEQ ID NO: 302205 - DNA, 25 bp, probe
ttggcagccagaaacatcctggtag

SEQ ID NO: 302206 - DNA, 25 bp, probe
ttggacaagttatgcctaatagcag

SEQ ID NO: 302207 - DNA, 25 bp, probe
ttggaatagttcaagccgggcgcag

SEQ ID NO: 302208 - DNA, 25 bp, probe
ttgaaatggttcctccaggagagat

SEQ ID NO: 302209 - DNA, 25 bp, probe
ttgtagatgtgtacttccaggaaga

SEQ ID NO: 302210 - DNA, 25 bp, probe
ttgtcatggcatctcttgcacagta

SEQ ID NO: 302211 - DNA, 25 bp, probe
ttgtcatggcatctcttgcacagta

SEQ ID NO: 302212 - DNA, 25 bp, probe
ttgctatcagcatcttctctgcaga

SEQ ID NO: 302213 - DNA, 25 bp, probe
ttgctctgatgtttgctcagtgcaa

SEQ ID NO: 302214 - DNA, 25 bp, probe
ttgctctgagtcagaagctggagct

SEQ ID NO: 302215 - DNA, 25 bp, probe
ttgctctgttgctgaggctggagtg

SEQ ID NO: 302216 - DNA, 25 bp, probe
ttgctctgtatgtgtgagccaggga

SEQ ID NO: 302217 - DNA, 25 bp, probe
ttgctctcattgtgtgactcagtgc

SEQ ID NO: 302218 - DNA, 25 bp, probe
ttggatctgatgtttcacgcagtcc

SEQ ID NO: 302219 - DNA, 25 bp, probe
ttggcatcggattgactccattcct

SEQ ID NO: 302220 - DNA, 25 bp, probe
ttgcagactgctcaaaccattcgtc

SEQ ID NO: 302221 - DNA, 25 bp, probe
ttgctgactgtggacgactcttaat

SEQ ID NO: 302222 - DNA, 25 bp, probe
ttgctgatttgtgagcatgctttaa

SEQ ID NO: 302223 - DNA, 25 bp, probe
ttgcaatgcattgtatggctttata

SEQ ID NO: 302224 - DNA, 25 bp, probe
ttgcaatgcattgtatggctttata

SEQ ID NO: 302225 - DNA, 25 bp, probe
ttgctgatgatctttatggctactt

SEQ ID NO: 302226 - DNA, 25 bp, probe
ttggcaatgcatttgatggccacca

SEQ ID NO: 302227 - DNA, 25 bp, probe
ttgtcatgatgctggagccagaccc

SEQ ID NO: 302228 - DNA, 25 bp, probe
ttgtatggcagcctgatctgggccc

SEQ ID NO: 302229 - DNA, 25 bp, probe
ttgaatgatgagccttcgtgccccc

SEQ ID NO: 302230 - DNA, 25 bp, probe
ttgacaatggggtcaggccccagag

SEQ ID NO: 302231 - DNA, 25 bp, probe
ttgtcagaggtggaaacactacaga

SEQ ID NO: 302232 - DNA, 25 bp, probe
ttgacatgagccctgaaaattccca

SEQ ID NO: 302233 - DNA, 25 bp, probe
ttgcactgacacttaagacttggga

SEQ ID NO: 302234 - DNA, 25 bp, probe
ttggctacagcagtgggactttgaa

SEQ ID NO: 302235 - DNA, 25 bp, probe
ttggcttccctagaactgtgaagca

SEQ ID NO: 302236 - DNA, 25 bp, probe
ttggttccatgttttcattgtaaga

SEQ ID NO: 302237 - DNA, 25 bp, probe
ttggtcatccagattctactaatag

SEQ ID NO: 302238 - DNA, 25 bp, probe
ttgctggcttctcttatactaaccc

SEQ ID NO: 302239 - DNA, 25 bp, probe
ttgctggcttctcttatactaaccc

SEQ ID NO: 302240 - DNA, 25 bp, probe
ttgctggttaacattcaccttcctc

SEQ ID NO: 302241 - DNA, 25 bp, probe
ttgtggttatagcttcccatatgcc

SEQ ID NO: 302242 - DNA, 25 bp, probe
ttgctggttgtggactatgccacct

SEQ ID NO: 302243 - DNA, 25 bp, probe
ttgtgctggaggtaagatgcccact

SEQ ID NO: 302244 - DNA, 25 bp, probe
ttgtgctggaggtaagatgcccact

SEQ ID NO: 302245 - DNA, 25 bp, probe
ttgcgtggctgtttcatgaccgctt

SEQ ID NO: 302246 - DNA, 25 bp, probe
ttggctgaagtaccagacctgctag

SEQ ID NO: 302247 - DNA, 25 bp, probe
ttgaatgggtgaacaacactgctgg

SEQ ID NO: 302248 - DNA, 25 bp, probe
ttgatattggtgtgcccacagtcac

SEQ ID NO: 302249 - DNA, 25 bp, probe
ttgatattggtgtgcccacagtcac

SEQ ID NO: 302250 - DNA, 25 bp, probe
ttgtgatgaggcacgcccatcagat

SEQ ID NO: 302251 - DNA, 25 bp, probe
ttgctatatcgcccaggctcaagtg

SEQ ID NO: 302252 - DNA, 25 bp, probe
ttgcttcactggccagagcttagtc

SEQ ID NO: 302253 - DNA, 25 bp, probe
ttgcattatctgatcaaattcaatc

SEQ ID NO: 302254 - DNA, 25 bp, probe
ttgttcctgttttcatctagtcaga

SEQ ID NO: 302255 - DNA, 25 bp, probe
ttgttactgttttatggtgccaagt

SEQ ID NO: 302256 - DNA, 25 bp, probe
ttggagaggtttgcgcctgtcaagt

SEQ ID NO: 302257 - DNA, 25 bp, probe
ttgagatggggtctcactctgtcac

SEQ ID NO: 302258 - DNA, 25 bp, probe
ttggtggggacttggctgtctgatc

SEQ ID NO: 302259 - DNA, 25 bp, probe
ttgggactggactggcagggtggct

SEQ ID NO: 302260 - DNA, 25 bp, probe
ttgggactggactggcagggtggct

SEQ ID NO: 302261 - DNA, 25 bp, probe
ttggagactcggctgccagagggag

SEQ ID NO: 302262 - DNA, 25 bp, probe
ttgggatttggcctggatacagtag

SEQ ID NO: 302263 - DNA, 25 bp, probe
ttgggatgggttcgtgtccagtccc

SEQ ID NO: 302264 - DNA, 25 bp, probe
ttggatgttttcctattcatcaggc

SEQ ID NO: 302265 - DNA, 25 bp, probe
ttgagacttattcgctactacgaga

SEQ ID NO: 302266 - DNA, 25 bp, probe
ttgagaattattcctttcctagact

SEQ ID NO: 302267 - DNA, 25 bp, probe
ttgagcatttagtcacatttggtag

SEQ ID NO: 302268 - DNA, 25 bp, probe
ttgcatcatttggtaatttcctacc

SEQ ID NO: 302269 - DNA, 25 bp, probe
ttgcatcaagtgttcgagtccctga

SEQ ID NO: 302270 - DNA, 25 bp, probe
ttgacaagatgattcgcaagcctga

SEQ ID NO: 302271 - DNA, 25 bp, probe
ttgctcaacatgctaatagccatga

SEQ ID NO: 302272 - DNA, 25 bp, probe
ttgctcaacatgctaatagccatga

SEQ ID NO: 302273 - DNA, 25 bp, probe
ttgctgcctcatgctaagactcagt

SEQ ID NO: 302274 - DNA, 25 bp, probe
ttgggccattaaaagctcagctcct

SEQ ID NO: 302275 - DNA, 25 bp, probe
ttgggcctcggagatgatcagaggt

SEQ ID NO: 302276 - DNA, 25 bp, probe
ttgatgtgcccttgaataccagggt

SEQ ID NO: 302277 - DNA, 25 bp, probe
ttgaggccttggatgaacttgcttc

SEQ ID NO: 302278 - DNA, 25 bp, probe
ttgagctcctgggaatcaacttgta

SEQ ID NO: 302279 - DNA, 25 bp, probe
ttggtactggggtaaatgtgtacct

SEQ ID NO: 302280 - DNA, 25 bp, probe
ttgagaagggggtgagtggtgccag

SEQ ID NO: 302281 - DNA, 25 bp, probe
ttggatatggcggggggagggctgg

SEQ ID NO: 302282 - DNA, 25 bp, probe
ttggaatccgacttggggaccatgg

SEQ ID NO: 302283 - DNA, 25 bp, probe
ttggaatcgtcctctgggaaatcgc

SEQ ID NO: 302284 - DNA, 25 bp, probe
ttgaagatcccagtggtcccaaacc

SEQ ID NO: 302285 - DNA, 25 bp, probe
ttgaagatcccagtggtcccaaacc

SEQ ID NO: 302286 - DNA, 25 bp, probe
ttgaacacccctggatcacagcaaa

SEQ ID NO: 302287 - DNA, 25 bp, probe
ttgtacaaccagtatgatctgcaga

SEQ ID NO: 302288 - DNA, 25 bp, probe
ttgtaaaccatgtcatgtggaaaga

SEQ ID NO: 302289 - DNA, 25 bp, probe
ttgctgtagcacttggaatagaaaa

SEQ ID NO: 302290 - DNA, 25 bp, probe
ttgctgttccttaatttgattaatt

SEQ ID NO: 302291 - DNA, 25 bp, probe
ttgcttccactcttttctgtagaat

SEQ ID NO: 302292 - DNA, 25 bp, probe
ttgctttcacaatttgtcttacaat

SEQ ID NO: 302293 - DNA, 25 bp, probe
ttgtgtctgccatagtgacctaaaa

SEQ ID NO: 302294 - DNA, 25 bp, probe
ttggatcgaattctcactctcacaa

SEQ ID NO: 302295 - DNA, 25 bp, probe
ttggaagactacttcactgctacag

SEQ ID NO: 302296 - DNA, 25 bp, probe
ttggaagactacttcactgctacag

SEQ ID NO: 302297 - DNA, 25 bp, probe
ttgacaatgactattccctgacagt

SEQ ID NO: 302298 - DNA, 25 bp, probe
ttgacaaaatgactggctcctgact

SEQ ID NO: 302299 - DNA, 25 bp, probe
ttgatgaaacagtgactccgcctca

SEQ ID NO: 302300 - DNA, 25 bp, probe
ttgtgaaatcagactgcaccctgaa

SEQ ID NO: 302301 - DNA, 25 bp, probe
ttgtacacatggataccgctcaaaa

SEQ ID NO: 302302 - DNA, 25 bp, probe
ttgttgccatggtaatcctgctcag

SEQ ID NO: 302303 - DNA, 25 bp, probe
ttgttgtatgagttccactgccaga

SEQ ID NO: 302304 - DNA, 25 bp, probe
ttgtggttgacttcatctcatccat

SEQ ID NO: 302305 - DNA, 25 bp, probe
ttgtggttgacttcatctcatccat

SEQ ID NO: 302306 - DNA, 25 bp, probe
ttgtgaatgatgcttgctgcctgcc

SEQ ID NO: 302307 - DNA, 25 bp, probe
ttgtaatcagatgagctgcagctcc

SEQ ID NO: 302308 - DNA, 25 bp, probe
ttgtaatcagatgagctgcagctcc

SEQ ID NO: 302309 - DNA, 25 bp, probe
ttgatgagctgagtgaagtggccca

SEQ ID NO: 302310 - DNA, 25 bp, probe
ttgatgagctgagtgaagtggccca

SEQ ID NO: 302311 - DNA, 25 bp, probe
ttgatgaggagttcacggcccagat

SEQ ID NO: 302312 - DNA, 25 bp, probe
ttgaagaggtgagcacggccaacaa

SEQ ID NO: 302313 - DNA, 25 bp, probe
ttgaagatgtcaactcctggccaaa

SEQ ID NO: 302314 - DNA, 25 bp, probe
ttgtgagcactaactattggcagaa

SEQ ID NO: 302315 - DNA, 25 bp, probe
ttgggaccacagtatgtcgcaggca

SEQ ID NO: 302316 - DNA, 25 bp, probe
ttgggaccacagtatgtcgcaggca

SEQ ID NO: 302317 - DNA, 25 bp, probe
ttgtggacaccacatttgaggctgg

SEQ ID NO: 302318 - DNA, 25 bp, probe
ttgtagctactatattccagactgg

SEQ ID NO: 302319 - DNA, 25 bp, probe
ttgataatggttgttctcaatcttg

SEQ ID NO: 302320 - DNA, 25 bp, probe
ttgtaagagttctgtcatgcagtct

SEQ ID NO: 302321 - DNA, 25 bp, probe
ttggaagtttgcttctctgagcctc

SEQ ID NO: 302322 - DNA, 25 bp, probe
ttggacaatttgctcctggacaccg

SEQ ID NO: 302323 - DNA, 25 bp, probe
ttggacacgtggctttgggcgtcca

SEQ ID NO: 302324 - DNA, 25 bp, probe
ttgggacgtggcgttggtggggaca

SEQ ID NO: 302325 - DNA, 25 bp, probe
ttgtgtaccgtgggctgagagggga

SEQ ID NO: 302326 - DNA, 25 bp, probe
ttgttcccgttgcgcagttgaggac

SEQ ID NO: 302327 - DNA, 25 bp, probe
ttgcttccctggtggagtatgcagt

SEQ ID NO: 302328 - DNA, 25 bp, probe
ttgttcccttatgtattcaagctta

SEQ ID NO: 302329 - DNA, 25 bp, probe
ttgtatttgtttgtacggaccataa

SEQ ID NO: 302330 - DNA, 25 bp, probe
ttgtttctgtgtccctaccagacac

SEQ ID NO: 302331 - DNA, 25 bp, probe
ttgtttctcgtcagcataaagaatt

SEQ ID NO: 302332 - DNA, 25 bp, probe
ttgatgtactttacctgaaacaacc

SEQ ID NO: 302333 - DNA, 25 bp, probe
ttgatctgttttacaggaaacaaac

SEQ ID NO: 302334 - DNA, 25 bp, probe
ttgcattgttattacagagaaagca

SEQ ID NO: 302335 - DNA, 25 bp, probe
ttgttattgatatctcggatacaat

SEQ ID NO: 302336 - DNA, 25 bp, probe
ttgtcattttcatcggtgaacaata

SEQ ID NO: 302337 - DNA, 25 bp, probe
ttgatattctactggccatgatgcc

SEQ ID NO: 302338 - DNA, 25 bp, probe
ttgtacactatctggcacatatgcg

SEQ ID NO: 302339 - DNA, 25 bp, probe
ttgttcacaccgcgcagtatggaga

SEQ ID NO: 302340 - DNA, 25 bp, probe
ttgcttcaagccccgaaacacagca

SEQ ID NO: 302341 - DNA, 25 bp, probe
ttgcttcaagtctctggacaccacc

SEQ ID NO: 302342 - DNA, 25 bp, probe
ttgttaaatgtgtttacaccacaaa

SEQ ID NO: 302343 - DNA, 25 bp, probe
ttgttcaatgtcatctctatcctca

SEQ ID NO: 302344 - DNA, 25 bp, probe
ttgtctgccatgtcatttatgatgt

SEQ ID NO: 302345 - DNA, 25 bp, probe
ttggtcacattattttggttgcttg

SEQ ID NO: 302346 - DNA, 25 bp, probe
ttgagcccattcttctgggtgtgct

SEQ ID NO: 302347 - DNA, 25 bp, probe
ttgagcctattagttggaggctgca

SEQ ID NO: 302348 - DNA, 25 bp, probe
ttgactttgctagtttgtggcagag

SEQ ID NO: 302349 - DNA, 25 bp, probe
ttgcttttctcacttggagccgagg

SEQ ID NO: 302350 - DNA, 25 bp, probe
ttgtttgagcaacttggatgccagc

SEQ ID NO: 302351 - DNA, 25 bp, probe
ttgtttgcatcatcggaaccctagc

SEQ ID NO: 302352 - DNA, 25 bp, probe
ttgtttgcatcatcggaaccctagc

SEQ ID NO: 302353 - DNA, 25 bp, probe
ttgaaagctgcatcgagaacccgcc

SEQ ID NO: 302354 - DNA, 25 bp, probe
ttggaattcaatgcagaccccagcc

SEQ ID NO: 302355 - DNA, 25 bp, probe
ttggagctgtgaactggactcccct

SEQ ID NO: 302356 - DNA, 25 bp, probe
ttggagctgtgaactggactcccct

SEQ ID NO: 302357 - DNA, 25 bp, probe
ttggagctgtgaactggactcccct

SEQ ID NO: 302358 - DNA, 25 bp, probe
ttgggcgtaacgctatactgtctgc

SEQ ID NO: 302359 - DNA, 25 bp, probe
ttgggcgtaacgctatactgtctgc

SEQ ID NO: 302360 - DNA, 25 bp, probe
ttggacttgcaaagaggtattattg

SEQ ID NO: 302361 - DNA, 25 bp, probe
ttgacaatgtaacaggtcttattgg

SEQ ID NO: 302362 - DNA, 25 bp, probe
ttgaaatgtagcaataatgtctttt

SEQ ID NO: 302363 - DNA, 25 bp, probe
ttggaatgttgcacagaggctaata

SEQ ID NO: 302364 - DNA, 25 bp, probe
ttggaatgttgcacagaggctaata

SEQ ID NO: 302365 - DNA, 25 bp, probe
ttggcaacttcaatgagagggaatt

SEQ ID NO: 302366 - DNA, 25 bp, probe
ttggcaacttcaatgagagggaatt

SEQ ID NO: 302367 - DNA, 25 bp, probe
ttggtagttttgccaaggtcacttc

SEQ ID NO: 302368 - DNA, 25 bp, probe
ttgtctaagtagggccagggcaccg

SEQ ID NO: 302369 - DNA, 25 bp, probe
ttgttgaagttgtgtcatgggtgcc

SEQ ID NO: 302370 - DNA, 25 bp, probe
ttgttgaagttgtgtcatgggtgcc

SEQ ID NO: 302371 - DNA, 25 bp, probe
ttgaggtagttgtgcctgaccttgc

SEQ ID NO: 302372 - DNA, 25 bp, probe
ttgaggtccctgtatgtctacctct

SEQ ID NO: 302373 - DNA, 25 bp, probe
ttggagtcactcttatgctgtaccc

SEQ ID NO: 302374 - DNA, 25 bp, probe
ttggacaatccaactctgtccttct

SEQ ID NO: 302375 - DNA, 25 bp, probe
ttgagctgcaattcaggatcttttt

SEQ ID NO: 302376 - DNA, 25 bp, probe
ttgagctgcaattcaggatcttttt

SEQ ID NO: 302377 - DNA, 25 bp, probe
ttgaccaatagctgctgctttcata

SEQ ID NO: 302378 - DNA, 25 bp, probe
ttgactgcaacattgacgttctcaa

SEQ ID NO: 302379 - DNA, 25 bp, probe
ttgtgcgagccatgacctatgtcat

SEQ ID NO: 302380 - DNA, 25 bp, probe
ttggcacagccatgttttgtcttct

SEQ ID NO: 302381 - DNA, 25 bp, probe
ttgtcacaggcatatggtggtccat

SEQ ID NO: 302382 - DNA, 25 bp, probe
ttggcactggagtcaggcaggttcc

SEQ ID NO: 302383 - DNA, 25 bp, probe
ttggcactggagtcaggcaggttcc

SEQ ID NO: 302384 - DNA, 25 bp, probe
ttggcactggagtcaggcaggttcc

SEQ ID NO: 302385 - DNA, 25 bp, probe
ttgtgcacggcagctggccgtgtcc

SEQ ID NO: 302386 - DNA, 25 bp, probe
ttgctcacagggactctccatatgt

SEQ ID NO: 302387 - DNA, 25 bp, probe
ttgctcacagggactctccatatgt

SEQ ID NO: 302388 - DNA, 25 bp, probe
ttgtcgcagcttactgtccaagagt

SEQ ID NO: 302389 - DNA, 25 bp, probe
ttgtcactgcccagacctagcagtg

SEQ ID NO: 302390 - DNA, 25 bp, probe
ttgtcactgcccagacctagcagtg

SEQ ID NO: 302391 - DNA, 25 bp, probe
ttgtcctgccacatatcctaatgaa

SEQ ID NO: 302392 - DNA, 25 bp, probe
ttgtcctgccacatatcctaatgaa

SEQ ID NO: 302393 - DNA, 25 bp, probe
ttgtgacccagcagctatctaagtc

SEQ ID NO: 302394 - DNA, 25 bp, probe
ttgtgacccagcagctatctaagtc

SEQ ID NO: 302395 - DNA, 25 bp, probe
ttgtgaaagcgcccttcttatgtta

SEQ ID NO: 302396 - DNA, 25 bp, probe
ttgtgaaagcgcccttcttatgtta

SEQ ID NO: 302397 - DNA, 25 bp, probe
ttgtttacctccacatgctgatgat

SEQ ID NO: 302398 - DNA, 25 bp, probe
ttgcttgtacctctggctgactaaa

SEQ ID NO: 302399 - DNA, 25 bp, probe
ttgctttaggcctggagactttcat

SEQ ID NO: 302400 - DNA, 25 bp, probe
ttggtttgagcccagaacagcctac

SEQ ID NO: 302401 - DNA, 25 bp, probe
ttggttcttggaaaaactctaggag

SEQ ID NO: 302402 - DNA, 25 bp, probe
ttggttcttggaaaaactctaggag

SEQ ID NO: 302403 - DNA, 25 bp, probe
ttggttttggttttgactcacctga

SEQ ID NO: 302404 - DNA, 25 bp, probe
ttgtgatcgttggaatttggtcatc

SEQ ID NO: 302405 - DNA, 25 bp, probe
ttggtgacagtggaatctttgtctc

SEQ ID NO: 302406 - DNA, 25 bp, probe
ttggtgtgcactgcgatcttctaca

SEQ ID NO: 302407 - DNA, 25 bp, probe
ttgtggtcctgaccatctgtgccaa

SEQ ID NO: 302408 - DNA, 25 bp, probe
ttgtagttgcgacttcttcgatagt

SEQ ID NO: 302409 - DNA, 25 bp, probe
ttgctttgtgaactgtctttcattg

SEQ ID NO: 302410 - DNA, 25 bp, probe
ttgctttgtgtgtgtcttcctgagc

SEQ ID NO: 302411 - DNA, 25 bp, probe
ttgcttttctgtttgcttccaagaa

SEQ ID NO: 302412 - DNA, 25 bp, probe
ttgttgttctattttgtacagacaa

SEQ ID NO: 302413 - DNA, 25 bp, probe
ttgtatgctcattgaactttaagaa

SEQ ID NO: 302414 - DNA, 25 bp, probe
ttgttccttttgctctgatagacaa

SEQ ID NO: 302415 - DNA, 25 bp, probe
ttgtaactgtttcatagaagagccc

SEQ ID NO: 302416 - DNA, 25 bp, probe
ttgtctagctcactttaaaagattc

SEQ ID NO: 302417 - DNA, 25 bp, probe
ttgtctcctcctttaactgagtcat

SEQ ID NO: 302418 - DNA, 25 bp, probe
ttggcttaggatttaactaaccatg

SEQ ID NO: 302419 - DNA, 25 bp, probe
ttggctcgtgtgcattaagtcaaca

SEQ ID NO: 302420 - DNA, 25 bp, probe
ttgtttgtctttaactgtcaaaaag

SEQ ID NO: 302421 - DNA, 25 bp, probe
ttggttgcttttaagttatggcaat

SEQ ID NO: 302422 - DNA, 25 bp, probe
ttggtggttttaggtgtgcatcgct

SEQ ID NO: 302423 - DNA, 25 bp, probe
ttgcaaagtttgcagctgttgctgc

SEQ ID NO: 302424 - DNA, 25 bp, probe
ttgcaaagtttgcagctgttgctgc

SEQ ID NO: 302425 - DNA, 25 bp, probe
ttgaagactgtttcatgctttgctc

SEQ ID NO: 302426 - DNA, 25 bp, probe
ttgcagaaggtgttcctttctcaca

SEQ ID NO: 302427 - DNA, 25 bp, probe
ttgcagaaggtgttcctttctcaca

SEQ ID NO: 302428 - DNA, 25 bp, probe
ttggcaactgtgttacctttcaagt

SEQ ID NO: 302429 - DNA, 25 bp, probe
ttggcaactgtgttacctttcaagt

SEQ ID NO: 302430 - DNA, 25 bp, probe
ttggcacctcggagacttttgcagc

SEQ ID NO: 302431 - DNA, 25 bp, probe
ttgtgcaggggggcgacttcctgac

SEQ ID NO: 302432 - DNA, 25 bp, probe
ttgtgcaggggggcgacttcctgac

SEQ ID NO: 302433 - DNA, 25 bp, probe
ttggcatcgacgcggagctgagcct

SEQ ID NO: 302434 - DNA, 25 bp, probe
ttgtgaagacgacgcggctgatccc

SEQ ID NO: 302435 - DNA, 25 bp, probe
ttgatgaaaacaagggatggctcat

SEQ ID NO: 302436 - DNA, 25 bp, probe
ttgaaatggacatctgtgatgggca

SEQ ID NO: 302437 - DNA, 25 bp, probe
ttgagaatggaatcctctgtggatg

SEQ ID NO: 302438 - DNA, 25 bp, probe
ttgtgaagaccatggtgctggtggt

SEQ ID NO: 302439 - DNA, 25 bp, probe
ttgtctgagacctgggtcgcttgct

SEQ ID NO: 302440 - DNA, 25 bp, probe
ttggtggaagcacaggtccgtgtcg

SEQ ID NO: 302441 - DNA, 25 bp, probe
ttggtcaaagcggagaccacgtgtg

SEQ ID NO: 302442 - DNA, 25 bp, probe
ttggctaaagaggaaccaacttctt

SEQ ID NO: 302443 - DNA, 25 bp, probe
ttggctggaacatgaaactgacctc

SEQ ID NO: 302444 - DNA, 25 bp, probe
ttgttggaaagctccactggccaca

SEQ ID NO: 302445 - DNA, 25 bp, probe
ttggggaaatcaggtgcagcggcca

SEQ ID NO: 302446 - DNA, 25 bp, probe
ttggggactacattgctgaaggaaa

SEQ ID NO: 302447 - DNA, 25 bp, probe
ttgggggctacaactgtgaggagaa

SEQ ID NO: 302448 - DNA, 25 bp, probe
ttgggagagtatcttgctgggcaag

SEQ ID NO: 302449 - DNA, 25 bp, probe
ttgggagagtatcttgctgggcaag

SEQ ID NO: 302450 - DNA, 25 bp, probe
ttggggactatgttgttggcacaga

SEQ ID NO: 302451 - DNA, 25 bp, probe
ttgttgcaacttctattgcagaaga

SEQ ID NO: 302452 - DNA, 25 bp, probe
ttggctgaatgcttgttaactgaaa

SEQ ID NO: 302453 - DNA, 25 bp, probe
ttgagtcagatgctttcatttacac

SEQ ID NO: 302454 - DNA, 25 bp, probe
ttgagtcagatgctttcatttacac

SEQ ID NO: 302455 - DNA, 25 bp, probe
ttggccatctggaatatgcattaaa

SEQ ID NO: 302456 - DNA, 25 bp, probe
ttgtctgtctgaggatgagttaagt

SEQ ID NO: 302457 - DNA, 25 bp, probe
ttgtctgtggaggggatgcgactgt

SEQ ID NO: 302458 - DNA, 25 bp, probe
ttgtcctcgagccatagtgaactgc

SEQ ID NO: 302459 - DNA, 25 bp, probe
ttgtcactggatacattcagaacta

SEQ ID NO: 302460 - DNA, 25 bp, probe
ttgtactgctgttcattgcattgca

SEQ ID NO: 302461 - DNA, 25 bp, probe
ttgtttgcttactttatgctcctgc

SEQ ID NO: 302462 - DNA, 25 bp, probe
ttgtttccctggttatgtgtggcac

SEQ ID NO: 302463 - DNA, 25 bp, probe
ttgtttccctggttatgtgtggcac

SEQ ID NO: 302464 - DNA, 25 bp, probe
ttgttttcctgtcttttgacatttg

SEQ ID NO: 302465 - DNA, 25 bp, probe
ttgttttcacttcacttttcgtggg

SEQ ID NO: 302466 - DNA, 25 bp, probe
ttgtgcttgtcctggttattgtcgg

SEQ ID NO: 302467 - DNA, 25 bp, probe
ttgtcctgttcttggtcatgtatgt

SEQ ID NO: 302468 - DNA, 25 bp, probe
ttgtgctcgttcaatgcgtagaaat

SEQ ID NO: 302469 - DNA, 25 bp, probe
ttgcagtggcttaatgtttgaaatt

SEQ ID NO: 302470 - DNA, 25 bp, probe
ttgaatgctcttgaatttgtatatt

SEQ ID NO: 302471 - DNA, 25 bp, probe
ttgacatggttctatattttattaa

SEQ ID NO: 302472 - DNA, 25 bp, probe
ttgaatgaccattacttttattaat

SEQ ID NO: 302473 - DNA, 25 bp, probe
ttgaatctacattcacttttttttg

SEQ ID NO: 302474 - DNA, 25 bp, probe
ttgttgctgagttggtttatagttt

SEQ ID NO: 302475 - DNA, 25 bp, probe
ttgtctgcagtttgttattgcatag

SEQ ID NO: 302476 - DNA, 25 bp, probe
ttgatccactgttgctcttagaagg

SEQ ID NO: 302477 - DNA, 25 bp, probe
ttgatcctttgtactctataatgtg

SEQ ID NO: 302478 - DNA, 25 bp, probe
ttgttccttaccttgaagctgtgga

SEQ ID NO: 302479 - DNA, 25 bp, probe
ttggttttgcccggatcattggaga

SEQ ID NO: 302480 - DNA, 25 bp, probe
ttgtgtttttccggcaagtgatagg

SEQ ID NO: 302481 - DNA, 25 bp, probe
ttgtgtttttccggcaagtgatagg

SEQ ID NO: 302482 - DNA, 25 bp, probe
ttgagtttcattgcataccggatac

SEQ ID NO: 302483 - DNA, 25 bp, probe
ttgagtatatcaatcctcttttgat

SEQ ID NO: 302484 - DNA, 25 bp, probe
ttgagatttcataccaggtttcatg

SEQ ID NO: 302485 - DNA, 25 bp, probe
ttgatattcttctccagtgttcatc

SEQ ID NO: 302486 - DNA, 25 bp, probe
ttgatattcttctccagtgttcatc

SEQ ID NO: 302487 - DNA, 25 bp, probe
ttgtcctcttaaaatgtgtcaatca

SEQ ID NO: 302488 - DNA, 25 bp, probe
ttgtccctctaagtcatttagccca

SEQ ID NO: 302489 - DNA, 25 bp, probe
ttgatcctatcctgtactatcacct

SEQ ID NO: 302490 - DNA, 25 bp, probe
ttgatcctatcctgtactatcacct

SEQ ID NO: 302491 - DNA, 25 bp, probe
ttgatcacattaaggtgttctcacc

SEQ ID NO: 302492 - DNA, 25 bp, probe
ttgtctgcactcagtttattcccta

SEQ ID NO: 302493 - DNA, 25 bp, probe
ttgtgtcactgatatcatttttcct

SEQ ID NO: 302494 - DNA, 25 bp, probe
ttgatgctataaagctcatttttaa

SEQ ID NO: 302495 - DNA, 25 bp, probe
ttgacttgaaatgctcttttgcaca

SEQ ID NO: 302496 - DNA, 25 bp, probe
ctctctgagtcctggcccaaagaag

SEQ ID NO: 302497 - DNA, 25 bp, probe
ttgtcaggagacggctcttctttga

SEQ ID NO: 302498 - DNA, 25 bp, probe
ttggatggcagtttgcctgctcttt

SEQ ID NO: 302499 - DNA, 25 bp, probe
ttggagccaatgtgactgctttcat

SEQ ID NO: 302500 - DNA, 25 bp, probe
ttgtcgcaatcatatactgtttctg

SEQ ID NO: 302501 - DNA, 25 bp, probe
ttgtggttcataccctgttttcgac

SEQ ID NO: 302502 - DNA, 25 bp, probe
ttgtctcttcataccggttttatga

SEQ ID NO: 302503 - DNA, 25 bp, probe
ttgtcttcccaaggtgatcttggaa

SEQ ID NO: 302504 - DNA, 25 bp, probe
ttgtttcccatctttttgttaccat

SEQ ID NO: 302505 - DNA, 25 bp, probe
ttgatttttcctaatgttgtaccta

SEQ ID NO: 302506 - DNA, 25 bp, probe
ttgtattttactgcatgttttcttc

SEQ ID NO: 302507 - DNA, 25 bp, probe
ttgaagtttagcaatatgacattct

SEQ ID NO: 302508 - DNA, 25 bp, probe
ttgaagttgtagtcaatgcctatga

SEQ ID NO: 302509 - DNA, 25 bp, probe
ttgagtttgctcacagtgcctgtgc

SEQ ID NO: 302510 - DNA, 25 bp, probe
ttgagttcatgctgtcggatctggc

SEQ ID NO: 302511 - DNA, 25 bp, probe
ttgagcatttagactctcgactggc

SEQ ID NO: 302512 - DNA, 25 bp, probe
ttgagacctagcaatcagtcagggc

SEQ ID NO: 302513 - DNA, 25 bp, probe
ttggagctatgggatcgtcatgtgg

SEQ ID NO: 302514 - DNA, 25 bp, probe
ttgattcttctggtgcagctcagtg

SEQ ID NO: 302515 - DNA, 25 bp, probe
ttgttttcaggtggtctggaggcag

SEQ ID NO: 302516 - DNA, 25 bp, probe
ttgttttacattgttgctgcactgg

SEQ ID NO: 302517 - DNA, 25 bp, probe
ttgtctattactttgtttcacatga

SEQ ID NO: 302518 - DNA, 25 bp, probe
ttgttttcactcaactttccaaggg

SEQ ID NO: 302519 - DNA, 25 bp, probe
ttgttttcactcaactttccaaggg

SEQ ID NO: 302520 - DNA, 25 bp, probe
ttgtattgtactgccattcctactg

SEQ ID NO: 302521 - DNA, 25 bp, probe
ttgtgttgctgatccaattctgtac

SEQ ID NO: 302522 - DNA, 25 bp, probe
ttgtgctgatcgtgctaaattttca

SEQ ID NO: 302523 - DNA, 25 bp, probe
ttgttactgctactacactttgctc

SEQ ID NO: 302524 - DNA, 25 bp, probe
ttgttgactgctttgttctttgcct

SEQ ID NO: 302525 - DNA, 25 bp, probe
ttgttgactgctttgttctttgcct

SEQ ID NO: 302526 - DNA, 25 bp, probe
ttgtgggtgtgtatcttcttatctc

SEQ ID NO: 302527 - DNA, 25 bp, probe
ttgtgggagctgaattcttcctgct

SEQ ID NO: 302528 - DNA, 25 bp, probe
ttgtgggagctgaattcttcctgct

SEQ ID NO: 302529 - DNA, 25 bp, probe
ttgtggagcgtgacattctcacctt

SEQ ID NO: 302530 - DNA, 25 bp, probe
ctgacccccaatgacaggttcattt

SEQ ID NO: 302531 - DNA, 25 bp, probe
ttgggagctttgctctatcctggac

SEQ ID NO: 302532 - DNA, 25 bp, probe
ttggaagccgagatggaccgcagac

SEQ ID NO: 302533 - DNA, 25 bp, probe
ttggaagccgagatggaccgcagac

SEQ ID NO: 302534 - DNA, 25 bp, probe
ttgcaaagcacaagctgggaccgcg

SEQ ID NO: 302535 - DNA, 25 bp, probe
ttggcaacatcaagcgggaccgtgc

SEQ ID NO: 302536 - DNA, 25 bp, probe
ttggagcagatctccgagacctgtc

SEQ ID NO: 302537 - DNA, 25 bp, probe
ttgtaaagatactgctgacctgtgc

SEQ ID NO: 302538 - DNA, 25 bp, probe
ttgtggcaagattttcatgactttg

SEQ ID NO: 302539 - DNA, 25 bp, probe
ttgtgacagcgtatgtgatgactgt

SEQ ID NO: 302540 - DNA, 25 bp, probe
ttgtgaactgtaatctgaagcagat

SEQ ID NO: 302541 - DNA, 25 bp, probe
ttgtgtcaatacccgaaatgatgta

SEQ ID NO: 302542 - DNA, 25 bp, probe
ttgtgtcagattaccagttatagga

SEQ ID NO: 302543 - DNA, 25 bp, probe
ttggccatgttagcctggtcaagat

SEQ ID NO: 302544 - DNA, 25 bp, probe
ttggcaacttgagctctcccaatta

SEQ ID NO: 302545 - DNA, 25 bp, probe
ttgggatattgttctgccccactta

SEQ ID NO: 302546 - DNA, 25 bp, probe
ttgatggtctggattccaccacttg

SEQ ID NO: 302547 - DNA, 25 bp, probe
ttgggtctagcacatgtcacccttg

SEQ ID NO: 302548 - DNA, 25 bp, probe
ttgggtctagcacatgtcacccttg

SEQ ID NO: 302549 - DNA, 25 bp, probe
ttgtggggtgcacagctcaacactt

SEQ ID NO: 302550 - DNA, 25 bp, probe
ttgtggggtgcacagctcaacactt

SEQ ID NO: 302551 - DNA, 25 bp, probe
ttggggtcagcatagctatagacaa

SEQ ID NO: 302552 - DNA, 25 bp, probe
ttgtcggaacaaatgccttgaaatg

SEQ ID NO: 302553 - DNA, 25 bp, probe
ttgtgggaacaacagcttatatggc

SEQ ID NO: 302554 - DNA, 25 bp, probe
ttgtgtgaagacagcggatttcggc

SEQ ID NO: 302555 - DNA, 25 bp, probe
ttgtgtcccaagaggtgttgaggta

SEQ ID NO: 302556 - DNA, 25 bp, probe
ttgagttcccagatggctggaaggg

SEQ ID NO: 302557 - DNA, 25 bp, probe
ttgtgttctccgtggtggaattgac

SEQ ID NO: 302558 - DNA, 25 bp, probe
ttgtaacctcagtgctggggactga

SEQ ID NO: 302559 - DNA, 25 bp, probe
ttgtaaaactgattcttggagacta

SEQ ID NO: 302560 - DNA, 25 bp, probe
ttggatacaactcaactgggactat

SEQ ID NO: 302561 - DNA, 25 bp, probe
ttggatacaactcaactgggactat

SEQ ID NO: 302562 - DNA, 25 bp, probe
ttggatccaaagaaacggctgacta

SEQ ID NO: 302563 - DNA, 25 bp, probe
ttgggccagaacgacacgggcttca

SEQ ID NO: 302564 - DNA, 25 bp, probe
ttgggccggagggcaagggatgcca

SEQ ID NO: 302565 - DNA, 25 bp, probe
ttggggtagagcacaagggacaaga

SEQ ID NO: 302566 - DNA, 25 bp, probe
ttgcaagggaacagagagggacctg

SEQ ID NO: 302567 - DNA, 25 bp, probe
ttgcaaggatgcaacggaagagtcc

SEQ ID NO: 302568 - DNA, 25 bp, probe
ttgcaaggaccaagggaggccagca

SEQ ID NO: 302569 - DNA, 25 bp, probe
ttgaggcgcggaagctggaggccac

SEQ ID NO: 302570 - DNA, 25 bp, probe
ttgaggcgcggaagctggaggccac

SEQ ID NO: 302571 - DNA, 25 bp, probe
ttgagcgcagcttgcggctggagga

SEQ ID NO: 302572 - DNA, 25 bp, probe
ttgatgtgcatcagcggaggagaac

SEQ ID NO: 302573 - DNA, 25 bp, probe
ttgatgtcacatggcctaggtcacc

SEQ ID NO: 302574 - DNA, 25 bp, probe
ttgatgccagcatccttggatcagt

SEQ ID NO: 302575 - DNA, 25 bp, probe
ttggaccacactgtgagcatgcagt

SEQ ID NO: 302576 - DNA, 25 bp, probe
ttgtgatctcacctgttggaatgca

SEQ ID NO: 302577 - DNA, 25 bp, probe
ttgtgctctactggttgagcctgcc

SEQ ID NO: 302578 - DNA, 25 bp, probe
ttgtgccttcgtggtactcatggct

SEQ ID NO: 302579 - DNA, 25 bp, probe
ttggcgttcgtctagacacagcacg

SEQ ID NO: 302580 - DNA, 25 bp, probe
ttgaggttcttcttcacaaggctga

SEQ ID NO: 302581 - DNA, 25 bp, probe
ttgaggttcttcttcacaaggctga

SEQ ID NO: 302582 - DNA, 25 bp, probe
ttgaaatgctcttttgcacaaggaa

SEQ ID NO: 302583 - DNA, 25 bp, probe
ttgtgaagtcattgcctgctcaaga

SEQ ID NO: 302584 - DNA, 25 bp, probe
ttgtaagatcaccccagcaacaggt

SEQ ID NO: 302585 - DNA, 25 bp, probe
ttgtacagaagccgccacaagggtg

SEQ ID NO: 302586 - DNA, 25 bp, probe
ttgtacaaagtggtgccgatatgtg

SEQ ID NO: 302587 - DNA, 25 bp, probe
ttgggaggagtggtgggtgcagtcc

SEQ ID NO: 302588 - DNA, 25 bp, probe
ttgggaggactccagtgcttgttgc

SEQ ID NO: 302589 - DNA, 25 bp, probe
ttgggaggactccagtgcttgttgc

SEQ ID NO: 302590 - DNA, 25 bp, probe
ttggagagggtcaagtctgctcttg

SEQ ID NO: 302591 - DNA, 25 bp, probe
ttgagagcaagacccatctctgcct

SEQ ID NO: 302592 - DNA, 25 bp, probe
ttgagacacagtctcactctgtcgc

SEQ ID NO: 302593 - DNA, 25 bp, probe
ttgaacacgcgttgtctgtgtcggt

SEQ ID NO: 302594 - DNA, 25 bp, probe
ttgtggatgttgactggctgggcag

SEQ ID NO: 302595 - DNA, 25 bp, probe
ttgagtgtgcttacttctggactgg

SEQ ID NO: 302596 - DNA, 25 bp, probe
ttgagggcttgaatgtcttggtgac

SEQ ID NO: 302597 - DNA, 25 bp, probe
ttgtgggcatatacctcttgtgctg

SEQ ID NO: 302598 - DNA, 25 bp, probe
ttgtttctttgcaatgcattgtatg

SEQ ID NO: 302599 - DNA, 25 bp, probe
ttgttttgtagcctgcttttgcttt

SEQ ID NO: 302600 - DNA, 25 bp, probe
ttgcaatatggatgtttctttgtat

SEQ ID NO: 302601 - DNA, 25 bp, probe
ttgcaatatttcttttctgatttat

SEQ ID NO: 302602 - DNA, 25 bp, probe
ttggcattcagtggttcctaatatt

SEQ ID NO: 302603 - DNA, 25 bp, probe
ttggatccagtggttgttacattct

SEQ ID NO: 302604 - DNA, 25 bp, probe
ttgagttgcttctgaggtacatttt

SEQ ID NO: 302605 - DNA, 25 bp, probe
ttgtgcttgtttacagcactactct

SEQ ID NO: 302606 - DNA, 25 bp, probe
ttgtctctttgtatacacaccacaa

SEQ ID NO: 302607 - DNA, 25 bp, probe
ttgtttgcttataagaacttcaaga

SEQ ID NO: 302608 - DNA, 25 bp, probe
ttgtgtctcttaatcgctcacttca

SEQ ID NO: 302609 - DNA, 25 bp, probe
ttgtatctggatctctgttatgtgc

SEQ ID NO: 302610 - DNA, 25 bp, probe
ttgtctgcggcaaattgtgcttggc

SEQ ID NO: 302611 - DNA, 25 bp, probe
ttggctgctgtaaacgtcgggctga

SEQ ID NO: 302612 - DNA, 25 bp, probe
ttgattggatattctcctcggactg

SEQ ID NO: 302613 - DNA, 25 bp, probe
ttgactgggcaacactgcaggacag

SEQ ID NO: 302614 - DNA, 25 bp, probe
ttggcatggctggccaactggcaga

SEQ ID NO: 302615 - DNA, 25 bp, probe
ttggcgagctgaacgtgtggcgctc

SEQ ID NO: 302616 - DNA, 25 bp, probe
ttggcgagctgaacgtgtggcgctc

SEQ ID NO: 302617 - DNA, 25 bp, probe
ttggggcgactcctgatgaagcaca

SEQ ID NO: 302618 - DNA, 25 bp, probe
ttggggcgactcctgatgaagcaca

SEQ ID NO: 302619 - DNA, 25 bp, probe
ttggggcacagcgaggtactgcagc

SEQ ID NO: 302620 - DNA, 25 bp, probe
ttggagcgaccagctgtcagctgca

SEQ ID NO: 302621 - DNA, 25 bp, probe
ttggcagctgatcagacctcaataa

SEQ ID NO: 302622 - DNA, 25 bp, probe
ttgacagctttgaaactgataaaga

SEQ ID NO: 302623 - DNA, 25 bp, probe
ttgtcatcttggagactaaagaata

SEQ ID NO: 302624 - DNA, 25 bp, probe
ttgtattctggaccacttactggtg

SEQ ID NO: 302625 - DNA, 25 bp, probe
ttgaaattgtcactcgcttactgga

SEQ ID NO: 302626 - DNA, 25 bp, probe
ttggcactcttactgcctgtaagga

SEQ ID NO: 302627 - DNA, 25 bp, probe
ttggcactcttactgcctgtaagga

SEQ ID NO: 302628 - DNA, 25 bp, probe
ttgatactgctcatgctgacttaaa

SEQ ID NO: 302629 - DNA, 25 bp, probe
ttgatgacatgtcctgcatcttcta

SEQ ID NO: 302630 - DNA, 25 bp, probe
ttgtgcaagatgcctgctctctaac

SEQ ID NO: 302631 - DNA, 25 bp, probe
ttgtcacaatgacctgctctgcaag

SEQ ID NO: 302632 - DNA, 25 bp, probe
ttgtgcacagagatctggctgcaag

SEQ ID NO: 302633 - DNA, 25 bp, probe
ttggcagcagtgaagctgttagagg

SEQ ID NO: 302634 - DNA, 25 bp, probe
ttggagtgctcatgtttgaagatga

SEQ ID NO: 302635 - DNA, 25 bp, probe
ttggagtgtcagcagctatagtgaa

SEQ ID NO: 302636 - DNA, 25 bp, probe
ttgtgttctcagccctattagaata

SEQ ID NO: 302637 - DNA, 25 bp, probe
ttgtgttctcagccctattagaata

SEQ ID NO: 302638 - DNA, 25 bp, probe
ttgtgtttgctgccttactggaata

SEQ ID NO: 302639 - DNA, 25 bp, probe
ttgtgtttgctgccttactggaata

SEQ ID NO: 302640 - DNA, 25 bp, probe
ttgtattttggttagctatgcaaag

SEQ ID NO: 302641 - DNA, 25 bp, probe
ttgtattagtcccaagccacagaag

SEQ ID NO: 302642 - DNA, 25 bp, probe
ttgtcattcagaaccaagtacagaa

SEQ ID NO: 302643 - DNA, 25 bp, probe
ttgattccagaaacatatgggctga

SEQ ID NO: 302644 - DNA, 25 bp, probe
ttgatgtctgcagaagaatgtgtct

SEQ ID NO: 302645 - DNA, 25 bp, probe
ttggtcatggagcataatgtgaccc

SEQ ID NO: 302646 - DNA, 25 bp, probe
ttgttgatgtagccaagttcacatc

SEQ ID NO: 302647 - DNA, 25 bp, probe
ttgttcatgtcagtgagagcttccc

SEQ ID NO: 302648 - DNA, 25 bp, probe
ttgtatgtgatcagaagctgcgtcc

SEQ ID NO: 302649 - DNA, 25 bp, probe
ttgtacatgagcacttctcagctgc

SEQ ID NO: 302650 - DNA, 25 bp, probe
ttgtgcacgcgggcatttgcaggca

SEQ ID NO: 302651 - DNA, 25 bp, probe
ttggcccggatctaacatggcacct

SEQ ID NO: 302652 - DNA, 25 bp, probe
ttggcccagtgcatcaacggcaaag

SEQ ID NO: 302653 - DNA, 25 bp, probe
ttgggccagttttacagtgtacatt

SEQ ID NO: 302654 - DNA, 25 bp, probe
ttggagtagttttagtgtatgtctt

SEQ ID NO: 302655 - DNA, 25 bp, probe
ttgatgaccagtatgtcagttcagt

SEQ ID NO: 302656 - DNA, 25 bp, probe
ttgagacacaccatgcttgttcact

SEQ ID NO: 302657 - DNA, 25 bp, probe
ttgaactcagccatctctatatatt

SEQ ID NO: 302658 - DNA, 25 bp, probe
ttgatttcactggtccatctatatt

SEQ ID NO: 302659 - DNA, 25 bp, probe
ttgtatacacatgctgccttcttgg

SEQ ID NO: 302660 - DNA, 25 bp, probe
ttgtatatcatctactcagtggctt

SEQ ID NO: 302661 - DNA, 25 bp, probe
ttgtcaagctcatttcctggtatga

SEQ ID NO: 302662 - DNA, 25 bp, probe
ttggcaaccatttcaatgagtttgc

SEQ ID NO: 302663 - DNA, 25 bp, probe
ttgtgaccctgtccatcattgttac

SEQ ID NO: 302664 - DNA, 25 bp, probe
ttgtgaagcctgttactttgtgtca

SEQ ID NO: 302665 - DNA, 25 bp, probe
ttgtaggcctgcattgtattatata

SEQ ID NO: 302666 - DNA, 25 bp, probe
ttgtagatggcgatgtgttatagac

SEQ ID NO: 302667 - DNA, 25 bp, probe
ttgtagatggcgatgtgttatagac

SEQ ID NO: 302668 - DNA, 25 bp, probe
ttggagagtccttgctttctgatat

SEQ ID NO: 302669 - DNA, 25 bp, probe
ttgataattcttactgttctgaaat

SEQ ID NO: 302670 - DNA, 25 bp, probe
ttgtgcacattcattttttgatgaa

SEQ ID NO: 302671 - DNA, 25 bp, probe
ttgtgacattgttcttacttgatta

SEQ ID NO: 302672 - DNA, 25 bp, probe
ttgtgacattgttcttacttgatta

SEQ ID NO: 302673 - DNA, 25 bp, probe
ttgtaaatattctacacatgtaaaa

SEQ ID NO: 302674 - DNA, 25 bp, probe
ttgtacatttctcagagtggataaa

SEQ ID NO: 302675 - DNA, 25 bp, probe
ttgtactgtgtttgagatggctaca

SEQ ID NO: 302676 - DNA, 25 bp, probe
ttgtgacttgtctagcagatattaa

SEQ ID NO: 302677 - DNA, 25 bp, probe
ttgatgatgcttcccaagaaatagt

SEQ ID NO: 302678 - DNA, 25 bp, probe
ttgtgctttctgcagtgaaatcagt

SEQ ID NO: 302679 - DNA, 25 bp, probe
ttgggatttgcattgatgaaacagt

SEQ ID NO: 302680 - DNA, 25 bp, probe
ttgtagtcaatgcctatgaacacat

SEQ ID NO: 302681 - DNA, 25 bp, probe
ttgtcagacaatggctataaactga

SEQ ID NO: 302682 - DNA, 25 bp, probe
ttgatcgccctgtgataggatctaa

SEQ ID NO: 302683 - DNA, 25 bp, probe
ttgatcgccctgtgataggatctaa

SEQ ID NO: 302684 - DNA, 25 bp, probe
ttgaccatctcgggaagtgaggaga

SEQ ID NO: 302685 - DNA, 25 bp, probe
ttgagcctgggctagatgaggagga

SEQ ID NO: 302686 - DNA, 25 bp, probe
ttgagcctgggctagatgaggagga

SEQ ID NO: 302687 - DNA, 25 bp, probe
ttgaggatgacgctgatgtggagtg

SEQ ID NO: 302688 - DNA, 25 bp, probe
ttggcagtgacggtgcaggccggag

SEQ ID NO: 302689 - DNA, 25 bp, probe
ttgtgagctggggtgagggctgcgg

SEQ ID NO: 302690 - DNA, 25 bp, probe
ttgtgcactgcaggtagagggtggg

SEQ ID NO: 302691 - DNA, 25 bp, probe
ttgtgcactgcttgaacgggggagg

SEQ ID NO: 302692 - DNA, 25 bp, probe
ttggcactgattgacctgggtcaga

SEQ ID NO: 302693 - DNA, 25 bp, probe
ttgacctgtggttctctggtgtaaa

SEQ ID NO: 302694 - DNA, 25 bp, probe
ttgtccttgagtgctcttgctatta

SEQ ID NO: 302695 - DNA, 25 bp, probe
ttgtctttacatgcatgcttgcatt

SEQ ID NO: 302696 - DNA, 25 bp, probe
ttgtctttcacaaattctgttggtg

SEQ ID NO: 302697 - DNA, 25 bp, probe
ttgtctttgacatggacgtttgtga

SEQ ID NO: 302698 - DNA, 25 bp, probe
ttgtccttcagcaagaaaggtgtgg

SEQ ID NO: 302699 - DNA, 25 bp, probe
ttgtccaggcgatgacaatggtgat

SEQ ID NO: 302700 - DNA, 25 bp, probe
ttgtcactgtcggaacattgttcat

SEQ ID NO: 302701 - DNA, 25 bp, probe
ttgtcactgtcggaacattgttcat

SEQ ID NO: 302702 - DNA, 25 bp, probe
ttgtcactctagaagagttcttcac

SEQ ID NO: 302703 - DNA, 25 bp, probe
ttgttgcacctgaggttcttatgca

SEQ ID NO: 302704 - DNA, 25 bp, probe
ttgttgcatgcagttgggttcaaat

SEQ ID NO: 302705 - DNA, 25 bp, probe
ttgtgtcagcaggtcatggtcccta

SEQ ID NO: 302706 - DNA, 25 bp, probe
ttgtatacagtagtgactcccatgc

SEQ ID NO: 302707 - DNA, 25 bp, probe
ttggcttcatgtttgaaagctcgcc

SEQ ID NO: 302708 - DNA, 25 bp, probe
ttggcatgtgtaaagagaatatctg

SEQ ID NO: 302709 - DNA, 25 bp, probe
ttgtgcattctagagtgcatatatt

SEQ ID NO: 302710 - DNA, 25 bp, probe
ttggcatgattcttagtcatacttg

SEQ ID NO: 302711 - DNA, 25 bp, probe
ttggcagtttcaatgtctgtctctg

SEQ ID NO: 302712 - DNA, 25 bp, probe
ttgtggtttttgatgactctgaacc

SEQ ID NO: 302713 - DNA, 25 bp, probe
ttgtgtgattctgtcctacttgtac

SEQ ID NO: 302714 - DNA, 25 bp, probe
ttgaaattgtgtactcccttgtact

SEQ ID NO: 302715 - DNA, 25 bp, probe
ttgataatgttttgctactcttgtc

SEQ ID NO: 302716 - DNA, 25 bp, probe
ttgtaacactcttgtgaccgtgcca

SEQ ID NO: 302717 - DNA, 25 bp, probe
ttgtaacctgattgtggaaagcaca

SEQ ID NO: 302718 - DNA, 25 bp, probe
ttggaaccatgcaagtggcgactgc

SEQ ID NO: 302719 - DNA, 25 bp, probe
ttggctgaacatcgagaggccctcc

SEQ ID NO: 302720 - DNA, 25 bp, probe
ttggctgaacatcgagaggccctcc

SEQ ID NO: 302721 - DNA, 25 bp, probe
ttggatcaaatgcaggggtgtctcg

SEQ ID NO: 302722 - DNA, 25 bp, probe
ttggtaaacagttggttgttctggc

SEQ ID NO: 302723 - DNA, 25 bp, probe
ttggtaaccagttttgctcttcttc

SEQ ID NO: 302724 - DNA, 25 bp, probe
ttgtgtgtaacacctttactccttc

SEQ ID NO: 302725 - DNA, 25 bp, probe
ttgttgtatacttccttatgcttct

SEQ ID NO: 302726 - DNA, 25 bp, probe
ttggtttgagtgccctttgctattc

SEQ ID NO: 302727 - DNA, 25 bp, probe
ttgagctgctctttggcttttgcta

SEQ ID NO: 302728 - DNA, 25 bp, probe
ttgagctgctctttggcttttgcta

SEQ ID NO: 302729 - DNA, 25 bp, probe
ttgagtgccctttgctattctcaga

SEQ ID NO: 302730 - DNA, 25 bp, probe
ttgttgctgctctggtattctcaag

SEQ ID NO: 302731 - DNA, 25 bp, probe
ttgttgctgctctggtattctcaag

SEQ ID NO: 302732 - DNA, 25 bp, probe
ttgtgactctcagcgtatgttcagg

SEQ ID NO: 302733 - DNA, 25 bp, probe
ttgtgacctcctggttgtaagtgtt

SEQ ID NO: 302734 - DNA, 25 bp, probe
ttggactccctggtggttgagttta

SEQ ID NO: 302735 - DNA, 25 bp, probe
ttggatctcctcagatctttggttt

SEQ ID NO: 302736 - DNA, 25 bp, probe
ttggatgccccagtgaagttgtgtg

SEQ ID NO: 302737 - DNA, 25 bp, probe
ttggaggctccaggaggctggctgg

SEQ ID NO: 302738 - DNA, 25 bp, probe
ttggaggctgactgtagggctgggc

SEQ ID NO: 302739 - DNA, 25 bp, probe
ttggagcgctatgaggagggcctgg

SEQ ID NO: 302740 - DNA, 25 bp, probe
ttgtggccaaagcgaacagcctgga

SEQ ID NO: 302741 - DNA, 25 bp, probe
ttgtcccacacgtgaaaccagcatg

SEQ ID NO: 302742 - DNA, 25 bp, probe
ttgtcccacacgtgaaaccagcatg

SEQ ID NO: 302743 - DNA, 25 bp, probe
ttgtcccactgccattcaaagtcag

SEQ ID NO: 302744 - DNA, 25 bp, probe
ttgtccacacgcctaacaggacgta

SEQ ID NO: 302745 - DNA, 25 bp, probe
ttggctcacagggctgaaaggggct

SEQ ID NO: 302746 - DNA, 25 bp, probe
ttggtgtcagtgggaaagggcagtg

SEQ ID NO: 302747 - DNA, 25 bp, probe
ttggcttctgtgggccagtggggat

SEQ ID NO: 302748 - DNA, 25 bp, probe
ttggccttgtggcctcagggaactc

SEQ ID NO: 302749 - DNA, 25 bp, probe
ttggccttgtggcctcagggaactc

SEQ ID NO: 302750 - DNA, 25 bp, probe
ttggccattggttgccatggtgacc

SEQ ID NO: 302751 - DNA, 25 bp, probe
ttgagcctttgatatcttgctcccc

SEQ ID NO: 302752 - DNA, 25 bp, probe
ttgagctttctagaatatttgccta

SEQ ID NO: 302753 - DNA, 25 bp, probe
ttggctttaccatatgttgtgtcta

SEQ ID NO: 302754 - DNA, 25 bp, probe
ttggctttaccatatgttgtgtcta

SEQ ID NO: 302755 - DNA, 25 bp, probe
ttggctttagcatgacattcgggga

SEQ ID NO: 302756 - DNA, 25 bp, probe
ttggctttagcatgacattcgggga

SEQ ID NO: 302757 - DNA, 25 bp, probe
ttggccttagcttgacggcagggcc

SEQ ID NO: 302758 - DNA, 25 bp, probe
ttgggtctgtgctgagctggagggc

SEQ ID NO: 302759 - DNA, 25 bp, probe
ttgggatcctgctgacggaaattgt

SEQ ID NO: 302760 - DNA, 25 bp, probe
ttggcagtccgaggcaggggaattg

SEQ ID NO: 302761 - DNA, 25 bp, probe
ttgacaaccgaggagaggagcaccg

SEQ ID NO: 302762 - DNA, 25 bp, probe
ttgaggacacaggcacgggacacca

SEQ ID NO: 302763 - DNA, 25 bp, probe
ttgagattacccaggagacagcccg

SEQ ID NO: 302764 - DNA, 25 bp, probe
ttggatctaccctgagtatcctcca

SEQ ID NO: 302765 - DNA, 25 bp, probe
ttgtttgacaccaaggttcttcagc

SEQ ID NO: 302766 - DNA, 25 bp, probe
ttgtgtcgagctcacagcgtttcta

SEQ ID NO: 302767 - DNA, 25 bp, probe
ttgtcttggtcttagtgtttgctat

SEQ ID NO: 302768 - DNA, 25 bp, probe
ttggcttgtgttacattttgtgtgt

SEQ ID NO: 302769 - DNA, 25 bp, probe
ttgacttggtgaatatccatctttt

SEQ ID NO: 302770 - DNA, 25 bp, probe
ttgatctttgtgacttgtgcttttt

SEQ ID NO: 302771 - DNA, 25 bp, probe
ttgatcatttttgttctttattcat

SEQ ID NO: 302772 - DNA, 25 bp, probe
ttgatcatttttgttctttattcat

SEQ ID NO: 302773 - DNA, 25 bp, probe
ttgatcatattctgtttctgttttg

SEQ ID NO: 302774 - DNA, 25 bp, probe
ttgatgcaaatctttattcactttc

SEQ ID NO: 302775 - DNA, 25 bp, probe
ttgtgcagaatctctatgtatattc

SEQ ID NO: 302776 - DNA, 25 bp, probe
ttgtgcagacaatgctgtgctttcc

SEQ ID NO: 302777 - DNA, 25 bp, probe
ttgtgcagacaatgctgtgctttcc

SEQ ID NO: 302778 - DNA, 25 bp, probe
ttgatgaacagactgatgtctggtc

SEQ ID NO: 302779 - DNA, 25 bp, probe
ttgatgatagcaacgtgtccctggc

SEQ ID NO: 302780 - DNA, 25 bp, probe
ttggatcatagacggactcctggcc

SEQ ID NO: 302781 - DNA, 25 bp, probe
ttgtactagcagagagtcctgagcc

SEQ ID NO: 302782 - DNA, 25 bp, probe
ttgtactacatgaagggcaggcagc

SEQ ID NO: 302783 - DNA, 25 bp, probe
ttgtcttagatgttggtggtgcagc

SEQ ID NO: 302784 - DNA, 25 bp, probe
ttgtctctgggcttggatgacagca

SEQ ID NO: 302785 - DNA, 25 bp, probe
ttgatcatctgccacgtgattgaca

SEQ ID NO: 302786 - DNA, 25 bp, probe
ttgattatgccaagctgataactac

SEQ ID NO: 302787 - DNA, 25 bp, probe
ttgagtgtcaaggctggacagctac

SEQ ID NO: 302788 - DNA, 25 bp, probe
ttggactctcagtctgatgacagta

SEQ ID NO: 302789 - DNA, 25 bp, probe
ttgtagcttcatatatgacatgttt

SEQ ID NO: 302790 - DNA, 25 bp, probe
ttgtatctctaagttacatgaccta

SEQ ID NO: 302791 - DNA, 25 bp, probe
ttgttcccaaatttcatacctatca

SEQ ID NO: 302792 - DNA, 25 bp, probe
ttgggcccagaaactcaaccatcaa

SEQ ID NO: 302793 - DNA, 25 bp, probe
ttgtgtgccgcgatttgaacccaaa

SEQ ID NO: 302794 - DNA, 25 bp, probe
ttgaggagtcgctgttgaacccaga

SEQ ID NO: 302795 - DNA, 25 bp, probe
ttgaggagtcgctgttgaacccaga

SEQ ID NO: 302796 - DNA, 25 bp, probe
ttgtggagtcgaggagccaacccca

SEQ ID NO: 302797 - DNA, 25 bp, probe
ttgggcagacgagaccacactgagc

SEQ ID NO: 302798 - DNA, 25 bp, probe
ttgaggagaccacatcctgcaaggc

SEQ ID NO: 302799 - DNA, 25 bp, probe
ttgtggaaacacttctgtcaatgag

SEQ ID NO: 302800 - DNA, 25 bp, probe
ttgggaaacaaggcttccagtgcca

SEQ ID NO: 302801 - DNA, 25 bp, probe
ttgtggacaaccacacacacgtgcc

SEQ ID NO: 302802 - DNA, 25 bp, probe
ttgggacaacaggacagagacccca

SEQ ID NO: 302803 - DNA, 25 bp, probe
ttggaaacatcagaagctactctcc

SEQ ID NO: 302804 - DNA, 25 bp, probe
ttgagaagagtaaaagtccaccagc

SEQ ID NO: 302805 - DNA, 25 bp, probe
ttgatgaagaatttacagctcagac

SEQ ID NO: 302806 - DNA, 25 bp, probe
ttgtgtcagaagtctagcctcaggt

SEQ ID NO: 302807 - DNA, 25 bp, probe
ttggatcagaagtcgcagctctggt

SEQ ID NO: 302808 - DNA, 25 bp, probe
ttgtgatcaaaagggctatgggaag

SEQ ID NO: 302809 - DNA, 25 bp, probe
ttgtgtaaaaccctgcggctgaacc

SEQ ID NO: 302810 - DNA, 25 bp, probe
ttggagatacaaaacgggctacacc

SEQ ID NO: 302811 - DNA, 25 bp, probe
ttggcagagagatagccgggctcca

SEQ ID NO: 302812 - DNA, 25 bp, probe
ttggggtgtacaccagggtctccca

SEQ ID NO: 302813 - DNA, 25 bp, probe
ttggtggggtcaccaactactcacc

SEQ ID NO: 302814 - DNA, 25 bp, probe
ttggttgtgttctatcaaccccacc

SEQ ID NO: 302815 - DNA, 25 bp, probe
ttggattgcttgtcatacacccacc

SEQ ID NO: 302816 - DNA, 25 bp, probe
ttggattgcttgtcatacacccacc

SEQ ID NO: 302817 - DNA, 25 bp, probe
ttggtttctctctacagtgccaact

SEQ ID NO: 302818 - DNA, 25 bp, probe
ttgtgccttatcaaacaggacaaat

SEQ ID NO: 302819 - DNA, 25 bp, probe
ttggcctttctgaacagtgtcatca

SEQ ID NO: 302820 - DNA, 25 bp, probe
ttggtctttcaaacatgatgtcaga

SEQ ID NO: 302821 - DNA, 25 bp, probe
ttgtgtctttcttatcatgatttgg

SEQ ID NO: 302822 - DNA, 25 bp, probe
ttgatgaatttgctatgcgttatgg

SEQ ID NO: 302823 - DNA, 25 bp, probe
ttgagaatcatcagccacgtgtagg

SEQ ID NO: 302824 - DNA, 25 bp, probe
ttgagaactcttcagccatgattag

SEQ ID NO: 302825 - DNA, 25 bp, probe
ttggtcaatcttgactagattaaga

SEQ ID NO: 302826 - DNA, 25 bp, probe
ttggccttgctagagtaattgaaga

SEQ ID NO: 302827 - DNA, 25 bp, probe
ttgaccttgtaggggccatagacca

SEQ ID NO: 302828 - DNA, 25 bp, probe
ttggtcttgtacaggcacaaacagc

SEQ ID NO: 302829 - DNA, 25 bp, probe
ttggcgttgttcaggaccacagcga

SEQ ID NO: 302830 - DNA, 25 bp, probe
ttggggatgttcatgggccccagtt

SEQ ID NO: 302831 - DNA, 25 bp, probe
ttgtggcgttgtatgtggcctcaca

SEQ ID NO: 302832 - DNA, 25 bp, probe
ttgtgactttgtttgggccaaatgt

SEQ ID NO: 302833 - DNA, 25 bp, probe
ttggccttactttgtgggaaatgat

SEQ ID NO: 302834 - DNA, 25 bp, probe
ttgagccccgctattggtataattc

SEQ ID NO: 302835 - DNA, 25 bp, probe
ttgggccacgctcttgaggaagccc

SEQ ID NO: 302836 - DNA, 25 bp, probe
ttgggcgcccatcatggaggagcac

SEQ ID NO: 302837 - DNA, 25 bp, probe
ttgggcgccaagaagcatgggagag

SEQ ID NO: 302838 - DNA, 25 bp, probe
ttggcagcgtcaagtcagaggaggg

SEQ ID NO: 302839 - DNA, 25 bp, probe
ttggcgcgtctcatcaaggacgatg

SEQ ID NO: 302840 - DNA, 25 bp, probe
ttgagcatcgctacttcaaggccaa

SEQ ID NO: 302841 - DNA, 25 bp, probe
ttgacattcatcataacaacacaat

SEQ ID NO: 302842 - DNA, 25 bp, probe
ttggcattcacagcacatcaaacac

SEQ ID NO: 302843 - DNA, 25 bp, probe
ttgtctgccacagacatcccacaaa

SEQ ID NO: 302844 - DNA, 25 bp, probe
ttgtgtgaaactcactccacaaacc

SEQ ID NO: 302845 - DNA, 25 bp, probe
ttgtggaagactcactagccagaag

SEQ ID NO: 302846 - DNA, 25 bp, probe
ttggatgaagcacttggtaggcaga

SEQ ID NO: 302847 - DNA, 25 bp, probe
ttggagacatggtttgtgctggcaa

SEQ ID NO: 302848 - DNA, 25 bp, probe
ttggagactctgattgtcatgccac

SEQ ID NO: 302849 - DNA, 25 bp, probe
ttggagccactgattacacctcatc

SEQ ID NO: 302850 - DNA, 25 bp, probe
ttgtgatacaagattctgcacctca

SEQ ID NO: 302851 - DNA, 25 bp, probe
ttgtgcaagaaggtcagcagcaccc

SEQ ID NO: 302852 - DNA, 25 bp, probe
ttgtcaagaagctgccatacctgcc

SEQ ID NO: 302853 - DNA, 25 bp, probe
ttgtcacggaaagcatcctctccaa

SEQ ID NO: 302854 - DNA, 25 bp, probe
ttgtgcctcagaaaggccccctaaa

SEQ ID NO: 302855 - DNA, 25 bp, probe
ttgtgcttcaaatgatccttcctac

SEQ ID NO: 302856 - DNA, 25 bp, probe
ttgtgttctacatccctatcattag

SEQ ID NO: 302857 - DNA, 25 bp, probe
ttggtactgaaaccctgccattgaa

SEQ ID NO: 302858 - DNA, 25 bp, probe
ttggtactgaaaccctgccattgaa

SEQ ID NO: 302859 - DNA, 25 bp, probe
ttgtaactgtgaaactatggcttaa

SEQ ID NO: 302860 - DNA, 25 bp, probe
ttgtacatttcatcactcagtgtat

SEQ ID NO: 302861 - DNA, 25 bp, probe
ttgtccatgtgtttctccaatgtca

SEQ ID NO: 302862 - DNA, 25 bp, probe
ttgtccatgtgtttctccaatgtca

SEQ ID NO: 302863 - DNA, 25 bp, probe
ttgtcaatagttttctcattgctac

SEQ ID NO: 302864 - DNA, 25 bp, probe
ttgtaatatactggtctctgtgcta

SEQ ID NO: 302865 - DNA, 25 bp, probe
ttgtaataaatggcctgatgctaat

SEQ ID NO: 302866 - DNA, 25 bp, probe
ttgtcaataaatgcccagcctgcat

SEQ ID NO: 302867 - DNA, 25 bp, probe
ttgtcaaagaattcccaacgccagg

SEQ ID NO: 302868 - DNA, 25 bp, probe
ttggcagaaggaccggaacagccgg

SEQ ID NO: 302869 - DNA, 25 bp, probe
ttggaagggaccccagatacctgtg

SEQ ID NO: 302870 - DNA, 25 bp, probe
ttggaaggccaggtccagtaaccgg

SEQ ID NO: 302871 - DNA, 25 bp, probe
ttggaagagcaagggacagtgaggc

SEQ ID NO: 302872 - DNA, 25 bp, probe
ttggaagagcaagggacagtgaggc

SEQ ID NO: 302873 - DNA, 25 bp, probe
ttggaatgaccagagacatctatga

SEQ ID NO: 302874 - DNA, 25 bp, probe
ttgtgatacgcctaagtcctatgat

SEQ ID NO: 302875 - DNA, 25 bp, probe
ttgataaccccattttctatgtatg

SEQ ID NO: 302876 - DNA, 25 bp, probe
ttggaacacctcattttatggcacc

SEQ ID NO: 302877 - DNA, 25 bp, probe
ttgggaagcctccttttgaggcaaa

SEQ ID NO: 302878 - DNA, 25 bp, probe
ttgggaagcctccttttgaggcaaa

SEQ ID NO: 302879 - DNA, 25 bp, probe
ttgtggggctatggttttgcagtgc

SEQ ID NO: 302880 - DNA, 25 bp, probe
ttgtggtgagcgtgttcatcgcctg

SEQ ID NO: 302881 - DNA, 25 bp, probe
ttgtggtgagcgtgttcatcgcctg

SEQ ID NO: 302882 - DNA, 25 bp, probe
ttggcgatgaggtaattctccctaa

SEQ ID NO: 302883 - DNA, 25 bp, probe
ttggcgtgtgggaatccaccctgag

SEQ ID NO: 302884 - DNA, 25 bp, probe
ttgagcactgtggggattctccgtg

SEQ ID NO: 302885 - DNA, 25 bp, probe
ttgagatctgtgggaaaccgctgga

SEQ ID NO: 302886 - DNA, 25 bp, probe
ttggacttgggagagccgctatagg

SEQ ID NO: 302887 - DNA, 25 bp, probe
ttggacttgggagagccgctatagg

SEQ ID NO: 302888 - DNA, 25 bp, probe
ttgtgcacttttacaagccgcaaag

SEQ ID NO: 302889 - DNA, 25 bp, probe
ttgtccttgtgtacctgccaggaaa

SEQ ID NO: 302890 - DNA, 25 bp, probe
ttgattttattgactgcgtcaggga

SEQ ID NO: 302891 - DNA, 25 bp, probe
ttgattttattcgcaccattgcggt

SEQ ID NO: 302892 - DNA, 25 bp, probe
ttgttattttcatcatctttgggtc

SEQ ID NO: 302893 - DNA, 25 bp, probe
ttgttagagttatccctgcaggagt

SEQ ID NO: 302894 - DNA, 25 bp, probe
ttgttgaggttatttcctctgagca

SEQ ID NO: 302895 - DNA, 25 bp, probe
ttggaggagttaataccttagcaac

SEQ ID NO: 302896 - DNA, 25 bp, probe
ttggaggtgctgaaaacgttagcct

SEQ ID NO: 302897 - DNA, 25 bp, probe
ttggggtatccatagcagttggact

SEQ ID NO: 302898 - DNA, 25 bp, probe
ttggggtattaatgcaatgtgtggt

SEQ ID NO: 302899 - DNA, 25 bp, probe
ttgggccttttaggaatttgggatg

SEQ ID NO: 302900 - DNA, 25 bp, probe
ttgggtttttgagatttgctggtga

SEQ ID NO: 302901 - DNA, 25 bp, probe
ttggggggttgggttcctgaatgca

SEQ ID NO: 302902 - DNA, 25 bp, probe
ttggggggttgggttcctgaatgca

SEQ ID NO: 302903 - DNA, 25 bp, probe
ttgggtggagtaaccctgcctttga

SEQ ID NO: 302904 - DNA, 25 bp, probe
ttgggttgaaagattccctcagtga

SEQ ID NO: 302905 - DNA, 25 bp, probe
ttggtgtggaaccattacgcccagg

SEQ ID NO: 302906 - DNA, 25 bp, probe
ttgtctctgagaaccattctcccac

SEQ ID NO: 302907 - DNA, 25 bp, probe
ttgtcatcagctaatcctttgccca

SEQ ID NO: 302908 - DNA, 25 bp, probe
ttgtcatcagctaatcctttgccca

SEQ ID NO: 302909 - DNA, 25 bp, probe
ttgtcatcacaagtcaagttgcaca

SEQ ID NO: 302910 - DNA, 25 bp, probe
ttggcacagcgagcaggatccacac

SEQ ID NO: 302911 - DNA, 25 bp, probe
ttgtgccaccactagagacacagac

SEQ ID NO: 302912 - DNA, 25 bp, probe
ttgtgcgcaatgccaaggacacagc

SEQ ID NO: 302913 - DNA, 25 bp, probe
ttggagcagagccaagcaactccag

SEQ ID NO: 302914 - DNA, 25 bp, probe
ttgtgatgccatcaacaaccgagcc

SEQ ID NO: 302915 - DNA, 25 bp, probe
ttggacctccaagactctgcagtcc

SEQ ID NO: 302916 - DNA, 25 bp, probe
ttggacccctggaaactggtctcct

SEQ ID NO: 302917 - DNA, 25 bp, probe
ttggacccctggaaactggtctcct

SEQ ID NO: 302918 - DNA, 25 bp, probe
ttggacccctgaataaagttttgtg

SEQ ID NO: 302919 - DNA, 25 bp, probe
ttggcatctccatggtcaaagtttt

SEQ ID NO: 302920 - DNA, 25 bp, probe
ttggaatccctgggcaaagatttcc

SEQ ID NO: 302921 - DNA, 25 bp, probe
ttggaataactcacagggatattaa

SEQ ID NO: 302922 - DNA, 25 bp, probe
ttggtgtgaaactcggctgtattaa

SEQ ID NO: 302923 - DNA, 25 bp, probe
ttggggattacagctgtcatgaatt

SEQ ID NO: 302924 - DNA, 25 bp, probe
ttggaggtcccagagtgcagccaat

SEQ ID NO: 302925 - DNA, 25 bp, probe
ttgggactcccagcaggcaaatccc

SEQ ID NO: 302926 - DNA, 25 bp, probe
ttgggactccatatcgctacaatac

SEQ ID NO: 302927 - DNA, 25 bp, probe
ttgatggaaccaaatagaaaaactc

SEQ ID NO: 302928 - DNA, 25 bp, probe
ttgggatcacaaacaggaaaaatat

SEQ ID NO: 302929 - DNA, 25 bp, probe
ttggttcagcaaacaaactaaaatg

SEQ ID NO: 302930 - DNA, 25 bp, probe
ttggcttctctaaccatccaaaaat

SEQ ID NO: 302931 - DNA, 25 bp, probe
ttgggtgctatgattcaccaaaaca

SEQ ID NO: 302932 - DNA, 25 bp, probe
ttggctggctttttaccacaaggca

SEQ ID NO: 302933 - DNA, 25 bp, probe
ttggttgcaactactactacaagcc

SEQ ID NO: 302934 - DNA, 25 bp, probe
ttggttcccataatagcttccagta

SEQ ID NO: 302935 - DNA, 25 bp, probe
ttggttccacaatcatctattgagt

SEQ ID NO: 302936 - DNA, 25 bp, probe
ttgtttacaaattgatcctgctgac

SEQ ID NO: 302937 - DNA, 25 bp, probe
ttgtttacatcaagatcacctctcc

SEQ ID NO: 302938 - DNA, 25 bp, probe
ttgtaaaatcaaatcatcctgtcac

SEQ ID NO: 302939 - DNA, 25 bp, probe
ttgtgacaagatcttcccagctaca

SEQ ID NO: 302940 - DNA, 25 bp, probe
ttgatgccatcattggttcccacga

SEQ ID NO: 302941 - DNA, 25 bp, probe
ttgatggcatcatgggcctggccta

SEQ ID NO: 302942 - DNA, 25 bp, probe
ttgtgagtatagccacctgtgccat

SEQ ID NO: 302943 - DNA, 25 bp, probe
ttgggtatgcagcagcctgctcagt

SEQ ID NO: 302944 - DNA, 25 bp, probe
ttgggtatgcagcagcctgctcagt

SEQ ID NO: 302945 - DNA, 25 bp, probe
ttggtgtagatgcgcgtcatccttc

SEQ ID NO: 302946 - DNA, 25 bp, probe
ttggtgtagatgcgcgtcatccttc

SEQ ID NO: 302947 - DNA, 25 bp, probe
ttggtgtggtgcagggatcctgatg

SEQ ID NO: 302948 - DNA, 25 bp, probe
ttgtgtgtagctgctcggacactca

SEQ ID NO: 302949 - DNA, 25 bp, probe
ttgtgtgtagctgctcggacactca

SEQ ID NO: 302950 - DNA, 25 bp, probe
ttggctgtcattgcatcggacctac

SEQ ID NO: 302951 - DNA, 25 bp, probe
ttgtcttctatcaatcgggccaatc

SEQ ID NO: 302952 - DNA, 25 bp, probe
ttgtcttctatcaatcgggccaatc

SEQ ID NO: 302953 - DNA, 25 bp, probe
ttgtatttggcaactgtgggcaata

SEQ ID NO: 302954 - DNA, 25 bp, probe
ttgaggcttagaacgctggtgcaat

SEQ ID NO: 302955 - DNA, 25 bp, probe
ttggtgtaagcaacctgtggcctgc

SEQ ID NO: 302956 - DNA, 25 bp, probe
ttggggagcagaaccagggcctgcc

SEQ ID NO: 302957 - DNA, 25 bp, probe
ttggggagcaggctcggctccccag

SEQ ID NO: 302958 - DNA, 25 bp, probe
ttggggagtccacaggctccccatc

SEQ ID NO: 302959 - DNA, 25 bp, probe
ttgggtgatgtcagggtgataacca

SEQ ID NO: 302960 - DNA, 25 bp, probe
ttggggcagatctgtagtaaacaat

SEQ ID NO: 302961 - DNA, 25 bp, probe
ttggaggcagcagtggggtcaaccc

SEQ ID NO: 302962 - DNA, 25 bp, probe
ttggggagattgctgtgtctatcgt

SEQ ID NO: 302963 - DNA, 25 bp, probe
ttggtggaatctttgtggttcttat

SEQ ID NO: 302964 - DNA, 25 bp, probe
ttggggcagttacctggttgctgtt

SEQ ID NO: 302965 - DNA, 25 bp, probe
ttggggcagttacctggttgctgtt

SEQ ID NO: 302966 - DNA, 25 bp, probe
ttgtggaaattaccttgtattttca

SEQ ID NO: 302967 - DNA, 25 bp, probe
ttgtttggtatactttgctttttct

SEQ ID NO: 302968 - DNA, 25 bp, probe
ttgtcttccattgttcagtattttt

SEQ ID NO: 302969 - DNA, 25 bp, probe
ttgttttagtgttggcagtaatgtt

SEQ ID NO: 302970 - DNA, 25 bp, probe
ttgttttttgtctcagcatcagtat

SEQ ID NO: 302971 - DNA, 25 bp, probe
ttgtttttgttctgagctccataag

SEQ ID NO: 302972 - DNA, 25 bp, probe
ttgattttagtccagtgatgtccat

SEQ ID NO: 302973 - DNA, 25 bp, probe
ttgtgattttgaccagttctccatt

SEQ ID NO: 302974 - DNA, 25 bp, probe
ttgtgcattttagcaggacttaatt

SEQ ID NO: 302975 - DNA, 25 bp, probe
ttggtacttatggcagaatctattt

SEQ ID NO: 302976 - DNA, 25 bp, probe
ttgtgtccttaggcaaagctgtggg

SEQ ID NO: 302977 - DNA, 25 bp, probe
ttgtgtcctatgcgctcatgagcgt

SEQ ID NO: 302978 - DNA, 25 bp, probe
ttgtagcctatgcgctcaatggccc

SEQ ID NO: 302979 - DNA, 25 bp, probe
ttggaacagtcggctacatggcacc

SEQ ID NO: 302980 - DNA, 25 bp, probe
ttggtacagttcataattcaccaaa

SEQ ID NO: 302981 - DNA, 25 bp, probe
ttgtgaaagttcttaacctgcccaa

SEQ ID NO: 302982 - DNA, 25 bp, probe
ttgtcaaataccctaatgcttccca

SEQ ID NO: 302983 - DNA, 25 bp, probe
ttggcaaaacccactgtgaccatca

SEQ ID NO: 302984 - DNA, 25 bp, probe
ttgtgcacagattcccgactgtggc

SEQ ID NO: 302985 - DNA, 25 bp, probe
ttgtgcacatgctcacttgaggtgc

SEQ ID NO: 302986 - DNA, 25 bp, probe
ttggcaatgtgtccatcatgatggt

SEQ ID NO: 302987 - DNA, 25 bp, probe
ttggtatatgctcatctgagtgacg

SEQ ID NO: 302988 - DNA, 25 bp, probe
ttggttcctgtattgagatgcatca

SEQ ID NO: 302989 - DNA, 25 bp, probe
ttggctgtcccaaagagcagtgcaa

SEQ ID NO: 302990 - DNA, 25 bp, probe
ttggctgtcccaaagagcagtgcaa

SEQ ID NO: 302991 - DNA, 25 bp, probe
ttggtgccaccattgagaactccag

SEQ ID NO: 302992 - DNA, 25 bp, probe
ttggatgccctaccatatacaccag

SEQ ID NO: 302993 - DNA, 25 bp, probe
ttggatgccctaccatatacaccag

SEQ ID NO: 302994 - DNA, 25 bp, probe
ttggagcttctattgccatgaacca

SEQ ID NO: 302995 - DNA, 25 bp, probe
ttggtgctgttgggcgcatgaccac

SEQ ID NO: 302996 - DNA, 25 bp, probe
ttgggctgtgtcaacagcagcctca

SEQ ID NO: 302997 - DNA, 25 bp, probe
ttgggcgttcatgagatcctcttct

SEQ ID NO: 302998 - DNA, 25 bp, probe
ttggaattataaagtcatctcttct

SEQ ID NO: 302999 - DNA, 25 bp, probe
ttgtaatttcagtgtctctatttat

SEQ ID NO: 303000 - DNA, 25 bp, probe
ttggatattacttatgtctaatttt

SEQ ID NO: 303001 - DNA, 25 bp, probe
ttgtgaagctacacagtatttgttt

SEQ ID NO: 303002 - DNA, 25 bp, probe
ttgtacaatacttcagactgttttt

SEQ ID NO: 303003 - DNA, 25 bp, probe
ttgtacaatacttcagactgttttt

SEQ ID NO: 303004 - DNA, 25 bp, probe
ttgtcccattcttggagtagtttta

SEQ ID NO: 303005 - DNA, 25 bp, probe
ttgtgtcgtttgtgaaagttcttaa

SEQ ID NO: 303006 - DNA, 25 bp, probe
ttgttgcctttcttgaagtgttctc

SEQ ID NO: 303007 - DNA, 25 bp, probe
ttggtgccttcttggtattgtaccc

SEQ ID NO: 303008 - DNA, 25 bp, probe
ttggtgccttcttggtattgtaccc

SEQ ID NO: 303009 - DNA, 25 bp, probe
ttgatggacatttgggttgtttccc

SEQ ID NO: 303010 - DNA, 25 bp, probe
ttggagtctgtggggtcgtactccc

SEQ ID NO: 303011 - DNA, 25 bp, probe
ttggagatcctcaggctggtatccg

SEQ ID NO: 303012 - DNA, 25 bp, probe
ttgggtatctcagctctggtaccta

SEQ ID NO: 303013 - DNA, 25 bp, probe
ttgttgaatccagtccaggtaacta

SEQ ID NO: 303014 - DNA, 25 bp, probe
ttgttgaatccagtccaggtaacta

SEQ ID NO: 303015 - DNA, 25 bp, probe
ttgttagatcacatcgccgataacc

SEQ ID NO: 303016 - DNA, 25 bp, probe
ttgttactcacagcgctctgacata

SEQ ID NO: 303017 - DNA, 25 bp, probe
ttggtccgacatgccttgaaaccag

SEQ ID NO: 303018 - DNA, 25 bp, probe
ttggtaggcaatttcttgcaaccac

SEQ ID NO: 303019 - DNA, 25 bp, probe
ttgtgtcagagcgattcctggaacc

SEQ ID NO: 303020 - DNA, 25 bp, probe
ttggtgccagccatggtggagacct

SEQ ID NO: 303021 - DNA, 25 bp, probe
ttggccgagctcctggggagctcct

SEQ ID NO: 303022 - DNA, 25 bp, probe
ttggccatggagcgtggtagccact

SEQ ID NO: 303023 - DNA, 25 bp, probe
ttggccaggcacagtggctcatgcc

SEQ ID NO: 303024 - DNA, 25 bp, probe
ttggccaggcacagtggctcatgcc

SEQ ID NO: 303025 - DNA, 25 bp, probe
ttggtcaggcgcagtggctcatgcc

SEQ ID NO: 303026 - DNA, 25 bp, probe
ttgtgtcatgtgttcagctggccag

SEQ ID NO: 303027 - DNA, 25 bp, probe
ttgtgtgtgtgcacgcatggctgag

SEQ ID NO: 303028 - DNA, 25 bp, probe
ttggtgtgtcgcccaggcgacaaaa

SEQ ID NO: 303029 - DNA, 25 bp, probe
ttggatgttcagtaaagctcaaaaa

SEQ ID NO: 303030 - DNA, 25 bp, probe
ttgagtgctccagttaagacagtaa

SEQ ID NO: 303031 - DNA, 25 bp, probe
ttgatgattccactaaagaagttga

SEQ ID NO: 303032 - DNA, 25 bp, probe
ttggttgccagtcatacaaattaaa

SEQ ID NO: 303033 - DNA, 25 bp, probe
ttggttgccagtcatacaaattaaa

SEQ ID NO: 303034 - DNA, 25 bp, probe
ttggtagccactgctagatatttat

SEQ ID NO: 303035 - DNA, 25 bp, probe
ttggtttcctccttgatatatatgt

SEQ ID NO: 303036 - DNA, 25 bp, probe
ttgggagtcctcatgtgtattgaat

SEQ ID NO: 303037 - DNA, 25 bp, probe
ttgtggttggctatggtgatcttaa

SEQ ID NO: 303038 - DNA, 25 bp, probe
ttggtttggctacttgaactctaca

SEQ ID NO: 303039 - DNA, 25 bp, probe
ttggtttggctacttgaactctaca

SEQ ID NO: 303040 - DNA, 25 bp, probe
ttggtttggttttattctcagagcc

SEQ ID NO: 303041 - DNA, 25 bp, probe
ttggtttggttttattctcagagcc

SEQ ID NO: 303042 - DNA, 25 bp, probe
ttggtttgttttgctatgtacagtc

SEQ ID NO: 303043 - DNA, 25 bp, probe
ttggtttgttttgctatgtacagtc

SEQ ID NO: 303044 - DNA, 25 bp, probe
ttgtgttttgtcactctagaagagt

SEQ ID NO: 303045 - DNA, 25 bp, probe
ttgtttgcttgtgttctacaagtaa

SEQ ID NO: 303046 - DNA, 25 bp, probe
ttgtgtatgctttgtcttttaagtt

SEQ ID NO: 303047 - DNA, 25 bp, probe
ttgtgtatgctttgtcttttaagtt

SEQ ID NO: 303048 - DNA, 25 bp, probe
ttgggatgcaattgtgttgtaaagt

SEQ ID NO: 303049 - DNA, 25 bp, probe
ttggagtcatagcatgtgtgtaaac

SEQ ID NO: 303050 - DNA, 25 bp, probe
ttggctgtatgactgaagtaataac

SEQ ID NO: 303051 - DNA, 25 bp, probe
ttggatgctgcatatgaagttaaca

SEQ ID NO: 303052 - DNA, 25 bp, probe
ttggatgccatttgattgtaataaa

SEQ ID NO: 303053 - DNA, 25 bp, probe
ttgggactgctctatggtaaaacac

SEQ ID NO: 303054 - DNA, 25 bp, probe
ttgggactgctctatggtaaaacac

SEQ ID NO: 303055 - DNA, 25 bp, probe
ttggtacatgcctgttaatattcat

SEQ ID NO: 303056 - DNA, 25 bp, probe
ttgtgtaagtaatttgaatatccaa

SEQ ID NO: 303057 - DNA, 25 bp, probe
ttggtaagtggataagattacacag

SEQ ID NO: 303058 - DNA, 25 bp, probe
ttggtgagactggctaaagtaacaa

SEQ ID NO: 303059 - DNA, 25 bp, probe
ttggtgagactggctaaagtaacaa

SEQ ID NO: 303060 - DNA, 25 bp, probe
ttggtgggggtagagctgatccaga

SEQ ID NO: 303061 - DNA, 25 bp, probe
ttgtctgggtgcggaggagctccca

SEQ ID NO: 303062 - DNA, 25 bp, probe
ttggtgacttgaggctggagctccc

SEQ ID NO: 303063 - DNA, 25 bp, probe
ttgtggactttggcagtgcccagcc

SEQ ID NO: 303064 - DNA, 25 bp, probe
ttgtggacctaggcagttcctgact

SEQ ID NO: 303065 - DNA, 25 bp, probe
ttggtacacatagcttctccagacc

SEQ ID NO: 303066 - DNA, 25 bp, probe
ttggtacatatgatgatttccatac

SEQ ID NO: 303067 - DNA, 25 bp, probe
ttggctattctgttggctttcatca

SEQ ID NO: 303068 - DNA, 25 bp, probe
ttggttgcttgatggctttcattcc

SEQ ID NO: 303069 - DNA, 25 bp, probe
ttggtatgggaaccttctcttcgca

SEQ ID NO: 303070 - DNA, 25 bp, probe
ttggaaggaagacgtctcctggccc

SEQ ID NO: 303071 - DNA, 25 bp, probe
ttggaaggtgggttctgcgtgtccc

SEQ ID NO: 303072 - DNA, 25 bp, probe
ttggataagggtctgtggtcccggc

SEQ ID NO: 303073 - DNA, 25 bp, probe
ttggagaaggcttgtattagtccca

SEQ ID NO: 303074 - DNA, 25 bp, probe
ttggagaaggattactgtagatgca

SEQ ID NO: 303075 - DNA, 25 bp, probe
ttggagtgctggagactttggatcg

SEQ ID NO: 303076 - DNA, 25 bp, probe
ttggatgtggtcagctctccaggag

SEQ ID NO: 303077 - DNA, 25 bp, probe
ttgtgctgtggcttagccggagggg

SEQ ID NO: 303078 - DNA, 25 bp, probe
ttgtctgtcagaagagccggcgtga

SEQ ID NO: 303079 - DNA, 25 bp, probe
ttgtgttcaaagcacggcgaggcct

SEQ ID NO: 303080 - DNA, 25 bp, probe
ttggttcagcaagagaggcagaccc

SEQ ID NO: 303081 - DNA, 25 bp, probe
ttgggaagcaacaaagagcgagtcc

SEQ ID NO: 303082 - DNA, 25 bp, probe
ttgggaagcaacaaagagcgagtcc

SEQ ID NO: 303083 - DNA, 25 bp, probe
ttgggcaactacagcagagaagcct

SEQ ID NO: 303084 - DNA, 25 bp, probe
ttgtgcagaactctacgagaagctg

SEQ ID NO: 303085 - DNA, 25 bp, probe
ttggcagaactcaagggcaaagatg

SEQ ID NO: 303086 - DNA, 25 bp, probe
ttgggaagctcaatgatacaaacat

SEQ ID NO: 303087 - DNA, 25 bp, probe
ttggacgagagcttgaacagaaatc

SEQ ID NO: 303088 - DNA, 25 bp, probe
ttggcagcgacgtggctcgagaagc

SEQ ID NO: 303089 - DNA, 25 bp, probe
ttggagagagcctcgctccagagac

SEQ ID NO: 303090 - DNA, 25 bp, probe
ttgggaagctcattgcccgatgaac

SEQ ID NO: 303091 - DNA, 25 bp, probe
ttggtgaagctgtctgcacctgtca

SEQ ID NO: 303092 - DNA, 25 bp, probe
ttggtacagctgcctgactctaact

SEQ ID NO: 303093 - DNA, 25 bp, probe
ttgtggatcgcagctgacctgaacc

SEQ ID NO: 303094 - DNA, 25 bp, probe
ttgtggtgcacaaggactggaactc

SEQ ID NO: 303095 - DNA, 25 bp, probe
ttggggaaggtggctggactgctgg

SEQ ID NO: 303096 - DNA, 25 bp, probe
ttgtatccaaggtgctgaatcttgg

SEQ ID NO: 303097 - DNA, 25 bp, probe
ttgtgatcctacctttgaacttgag

SEQ ID NO: 303098 - DNA, 25 bp, probe
ttgtgatctcattccttttattcta

SEQ ID NO: 303099 - DNA, 25 bp, probe
ttgttcatttccaattgattctcta

SEQ ID NO: 303100 - DNA, 25 bp, probe
ttgtgtctcttgcatgattcttctt

SEQ ID NO: 303101 - DNA, 25 bp, probe
ttgtgtccatggagcatccttctcc

SEQ ID NO: 303102 - DNA, 25 bp, probe
ttgtgttcatcgagctactggccac

SEQ ID NO: 303103 - DNA, 25 bp, probe
ttgtgttcatcacatgctacctgcc

SEQ ID NO: 303104 - DNA, 25 bp, probe
ttgtgttctcagaatctgatgcttt

SEQ ID NO: 303105 - DNA, 25 bp, probe
ttgtatgttagcatcgactctttct

SEQ ID NO: 303106 - DNA, 25 bp, probe
ttgtattttctagacaattctctat

SEQ ID NO: 303107 - DNA, 25 bp, probe
ttgtttatttcagagcacattatta

SEQ ID NO: 303108 - DNA, 25 bp, probe
ttgtttatttcatcatgcgaattgt

SEQ ID NO: 303109 - DNA, 25 bp, probe
ttgtatctatttgtggtgaatgtgt

SEQ ID NO: 303110 - DNA, 25 bp, probe
ttgtcagtttatgtggagaattttt

SEQ ID NO: 303111 - DNA, 25 bp, probe
ttggaattgtactgggttttctgta

SEQ ID NO: 303112 - DNA, 25 bp, probe
ttggaattgggctttcggtgtttgt

SEQ ID NO: 303113 - DNA, 25 bp, probe
ttggacttgggttcctggatggtgg

SEQ ID NO: 303114 - DNA, 25 bp, probe
ttggcactttgttttcaagatggtg

SEQ ID NO: 303115 - DNA, 25 bp, probe
ttggcactttgttttcaagatggtg

SEQ ID NO: 303116 - DNA, 25 bp, probe
ttggacctttactcacactatgtgc

SEQ ID NO: 303117 - DNA, 25 bp, probe
ttggactgtactttgacaccgtggc

SEQ ID NO: 303118 - DNA, 25 bp, probe
ttggttgttcttgggccacaggagc

SEQ ID NO: 303119 - DNA, 25 bp, probe
ttggttttgtgtggtgacgtggcac

SEQ ID NO: 303120 - DNA, 25 bp, probe
ttgtgtttttgcagagctcctgaca

SEQ ID NO: 303121 - DNA, 25 bp, probe
ttggattttgtcgcagtcacgatca

SEQ ID NO: 303122 - DNA, 25 bp, probe
ttggcactttgtggcaagattttca

SEQ ID NO: 303123 - DNA, 25 bp, probe
ttggatcttactgcacagctttctg

SEQ ID NO: 303124 - DNA, 25 bp, probe
ttggatcttactgcacagctttctg

SEQ ID NO: 303125 - DNA, 25 bp, probe
ttggattattctgcaggttcatctc

SEQ ID NO: 303126 - DNA, 25 bp, probe
ttggcatttgtcaactgctttacct

SEQ ID NO: 303127 - DNA, 25 bp, probe
ttggctgtttctttgtattaccctt

SEQ ID NO: 303128 - DNA, 25 bp, probe
ttgtgcttttattgttttccctgcg

SEQ ID NO: 303129 - DNA, 25 bp, probe
ttgtgctcatttaagtttcaaactt

SEQ ID NO: 303130 - DNA, 25 bp, probe
ttgttccttaacatacacatacttt

SEQ ID NO: 303131 - DNA, 25 bp, probe
ttgttccttaacatacacatacttt

SEQ ID NO: 303132 - DNA, 25 bp, probe
ttgtattgcttattcattatagcta

SEQ ID NO: 303133 - DNA, 25 bp, probe
ttggattgtatatcattgttgcaca

SEQ ID NO: 303134 - DNA, 25 bp, probe
ttgtttgtaatgtattttgatagca

SEQ ID NO: 303135 - DNA, 25 bp, probe
ttgtttaaaggctctctgtatgaag

SEQ ID NO: 303136 - DNA, 25 bp, probe
ttgtgaaaaaagagcttgttaatga

SEQ ID NO: 303137 - DNA, 25 bp, probe
ttggagcaagaaatgggctttgaaa

SEQ ID NO: 303138 - DNA, 25 bp, probe
ttggagcaagaaatgggctttgaaa

SEQ ID NO: 303139 - DNA, 25 bp, probe
ttggcgcatctatagtggcatttta

SEQ ID NO: 303140 - DNA, 25 bp, probe
ttgggcctatattgcagggtttgat

SEQ ID NO: 303141 - DNA, 25 bp, probe
ttgtggctcctatctgtgttttgaa

SEQ ID NO: 303142 - DNA, 25 bp, probe
ttgtcttccattccattgttttgaa

SEQ ID NO: 303143 - DNA, 25 bp, probe
ttgtctgtctgctcttatttttgta

SEQ ID NO: 303144 - DNA, 25 bp, probe
ttgttttgctactttattatttgat

SEQ ID NO: 303145 - DNA, 25 bp, probe
ttgttttgctactttattatttgat

SEQ ID NO: 303146 - DNA, 25 bp, probe
ttgttttgctaaatatgttaattgc

SEQ ID NO: 303147 - DNA, 25 bp, probe
ttgtgtgcttgctaaatggtgtaca

SEQ ID NO: 303148 - DNA, 25 bp, probe
ttggctttgctatctgggtagaaat

SEQ ID NO: 303149 - DNA, 25 bp, probe
ttggcttctgtgtatctaggtggac

SEQ ID NO: 303150 - DNA, 25 bp, probe
ttggcttctgtgtatctaggtggac

SEQ ID NO: 303151 - DNA, 25 bp, probe
ttggctgttgtatttgaattgagat

SEQ ID NO: 303152 - DNA, 25 bp, probe
ttggcttggctgttcgatttgagcc

SEQ ID NO: 303153 - DNA, 25 bp, probe
ttggatttgctgttcgacaagagct

SEQ ID NO: 303154 - DNA, 25 bp, probe
ttggatttgctctcgaaaatgttaa

SEQ ID NO: 303155 - DNA, 25 bp, probe
ttgtgcttatcctggtaaaatataa

SEQ ID NO: 303156 - DNA, 25 bp, probe
ttgtctcttcaccgtgttaacataa

SEQ ID NO: 303157 - DNA, 25 bp, probe
ttgtgtctacaccaggtttgaaata

SEQ ID NO: 303158 - DNA, 25 bp, probe
ttgtttacccaccagattacaatcc

SEQ ID NO: 303159 - DNA, 25 bp, probe
ttgtttcaccaaccagttatactcc

SEQ ID NO: 303160 - DNA, 25 bp, probe
ttgtgtacaaacccagattgaagct

SEQ ID NO: 303161 - DNA, 25 bp, probe
ttgttatcaaacttcagctgtacct

SEQ ID NO: 303162 - DNA, 25 bp, probe
ttgattacaaatttgcctgttgcca

SEQ ID NO: 303163 - DNA, 25 bp, probe
ttgattacaaatttgcctgttgcca

SEQ ID NO: 303164 - DNA, 25 bp, probe
ttgttacaggaagtcccttgccatc

SEQ ID NO: 303165 - DNA, 25 bp, probe
ttgttcatcaggatgttgcctttac

SEQ ID NO: 303166 - DNA, 25 bp, probe
ttgttctcatggaattggcctattg

SEQ ID NO: 303167 - DNA, 25 bp, probe
ttgggctgcatgctattccattttg

SEQ ID NO: 303168 - DNA, 25 bp, probe
ttgggctgcatgctattccattttg

SEQ ID NO: 303169 - DNA, 25 bp, probe
ttggccgcatttatcatcatagttt

SEQ ID NO: 303170 - DNA, 25 bp, probe
ttggccacttgtaggtatcagtgtg

SEQ ID NO: 303171 - DNA, 25 bp, probe
ttgggactgtttggtatgagctgca

SEQ ID NO: 303172 - DNA, 25 bp, probe
ttgggagtgtttatcgagccaaatg

SEQ ID NO: 303173 - DNA, 25 bp, probe
ttgggatttttcacaactgataatg

SEQ ID NO: 303174 - DNA, 25 bp, probe
ttgggatttttcacaactgataatg

SEQ ID NO: 303175 - DNA, 25 bp, probe
ttgggttatttcatagacgatcaaa

SEQ ID NO: 303176 - DNA, 25 bp, probe
ttgggccattcttgcttagacagtc

SEQ ID NO: 303177 - DNA, 25 bp, probe
ttgtggactgtcaatcttagataga

SEQ ID NO: 303178 - DNA, 25 bp, probe
ttgtgtagctgtgtcatgtatatac

SEQ ID NO: 303179 - DNA, 25 bp, probe
ttggcatagtggcacattatattat

SEQ ID NO: 303180 - DNA, 25 bp, probe
ttggacaggaggacagtatttcaga

SEQ ID NO: 303181 - DNA, 25 bp, probe
ttggacaggaggacagtatttcaga

SEQ ID NO: 303182 - DNA, 25 bp, probe
ttggccaagatggacccatttcagt

SEQ ID NO: 303183 - DNA, 25 bp, probe
ttggaaatgtgcaaccactgcttct

SEQ ID NO: 303184 - DNA, 25 bp, probe
ttggcagaacgaacaccacattttg

SEQ ID NO: 303185 - DNA, 25 bp, probe
ttggcaggaagacagccctgtgatt

SEQ ID NO: 303186 - DNA, 25 bp, probe
ttggggacagattcagtcttgcctt

SEQ ID NO: 303187 - DNA, 25 bp, probe
ttgtgggcacgagagtgcggccctt

SEQ ID NO: 303188 - DNA, 25 bp, probe
ttggggatccagcaggagaccctct

SEQ ID NO: 303189 - DNA, 25 bp, probe
ttggggatccagcaggagaccctct

SEQ ID NO: 303190 - DNA, 25 bp, probe
ttgggagatcacttcagggacatgc

SEQ ID NO: 303191 - DNA, 25 bp, probe
ttgggagatactcccgctgtctcaa

SEQ ID NO: 303192 - DNA, 25 bp, probe
ttgggagattcatgcgatgtgtcca

SEQ ID NO: 303193 - DNA, 25 bp, probe
ttgggatgattgctcgattgtttgg

SEQ ID NO: 303194 - DNA, 25 bp, probe
ttgggatgattgctcgattgtttgg

SEQ ID NO: 303195 - DNA, 25 bp, probe
ttgggatttggcatgtgttttgtgt

SEQ ID NO: 303196 - DNA, 25 bp, probe
ttgggatttgtagttgcgacttctt

SEQ ID NO: 303197 - DNA, 25 bp, probe
ttgtgtgatttgtgttatactggtt

SEQ ID NO: 303198 - DNA, 25 bp, probe
ttgtgtataatgtgctttatttgca

SEQ ID NO: 303199 - DNA, 25 bp, probe
ttgttatacacagctttatgatatc

SEQ ID NO: 303200 - DNA, 25 bp, probe
ttgtaaaacagcctatagatgatga

SEQ ID NO: 303201 - DNA, 25 bp, probe
ttggaccaatagcccacagctgaga

SEQ ID NO: 303202 - DNA, 25 bp, probe
ttggtgtcaacagctcacaggagcg

SEQ ID NO: 303203 - DNA, 25 bp, probe
ttggtgtcaacagctcacaggagcg

SEQ ID NO: 303204 - DNA, 25 bp, probe
ttggtggatgacgtgccaaggagca

SEQ ID NO: 303205 - DNA, 25 bp, probe
ttgggtgatgccttcccagagtcaa

SEQ ID NO: 303206 - DNA, 25 bp, probe
ttgggtgatgccttcccagagtcaa

SEQ ID NO: 303207 - DNA, 25 bp, probe
ttggagtgacgcatctccaagccaa

SEQ ID NO: 303208 - DNA, 25 bp, probe
ttggagtgacgcatctccaagccaa

SEQ ID NO: 303209 - DNA, 25 bp, probe
ttgtggtacagacctccagatgtcc

SEQ ID NO: 303210 - DNA, 25 bp, probe
ttgtgtgctgaatccttgaatactc

SEQ ID NO: 303211 - DNA, 25 bp, probe
ttgtgtgctgaatccttgaatactc

SEQ ID NO: 303212 - DNA, 25 bp, probe
ttgtggctgccatcttgaggattcc

SEQ ID NO: 303213 - DNA, 25 bp, probe
ttgtgcgctgtattttgcagattat

SEQ ID NO: 303214 - DNA, 25 bp, probe
ttggcagcttattgcttcgaaaccc

SEQ ID NO: 303215 - DNA, 25 bp, probe
ttggcatcttctggctgtccaagaa

SEQ ID NO: 303216 - DNA, 25 bp, probe
ttggcatcttgtttttctaacaaca

SEQ ID NO: 303217 - DNA, 25 bp, probe
ttggcatcttctattgcctcatcca

SEQ ID NO: 303218 - DNA, 25 bp, probe
ttgtcagtgtctattgcaccaggaa

SEQ ID NO: 303219 - DNA, 25 bp, probe
ttggctgttcgatttgagccaggga

SEQ ID NO: 303220 - DNA, 25 bp, probe
ttggcaattccatgttccaggaagt

SEQ ID NO: 303221 - DNA, 25 bp, probe
ttggaagtacagtttcaaggatgaa

SEQ ID NO: 303222 - DNA, 25 bp, probe
ttggaatacagcctttcaagcagag

SEQ ID NO: 303223 - DNA, 25 bp, probe
ttgtacgacgatgtatcaacagaga

SEQ ID NO: 303224 - DNA, 25 bp, probe
ttgtccagacgaagtgacgttgaga

SEQ ID NO: 303225 - DNA, 25 bp, probe
ttgtccacaggtatgaggtagatga

SEQ ID NO: 303226 - DNA, 25 bp, probe
ttgtccctggtgcagaggtgagcag

SEQ ID NO: 303227 - DNA, 25 bp, probe
ttggctcgggtgcagagttcaccct

SEQ ID NO: 303228 - DNA, 25 bp, probe
ttggtcagggttgaattccagctct

SEQ ID NO: 303229 - DNA, 25 bp, probe
ttggtgcaaggtacaaggcccacac

SEQ ID NO: 303230 - DNA, 25 bp, probe
ttgggcaaggcgatgcaggtccatc

SEQ ID NO: 303231 - DNA, 25 bp, probe
ttggtcaaggtgagcggcacagatg

SEQ ID NO: 303232 - DNA, 25 bp, probe
ttgtgtgagttgccagctctggtca

SEQ ID NO: 303233 - DNA, 25 bp, probe
ttggggtttgcatttagatcattta

SEQ ID NO: 303234 - DNA, 25 bp, probe
ttggggtctatgtcattggtttctg

SEQ ID NO: 303235 - DNA, 25 bp, probe
ttgtgtgtttcatgctctggatttt

SEQ ID NO: 303236 - DNA, 25 bp, probe
ttgtgtgttgtttgatttgtttata

SEQ ID NO: 303237 - DNA, 25 bp, probe
ttgtgtgttgtttgatttgtttata

SEQ ID NO: 303238 - DNA, 25 bp, probe
ttgtgtttgttttttcctttgatgg

SEQ ID NO: 303239 - DNA, 25 bp, probe
ttgtgttttttttcttctgctatgt

SEQ ID NO: 303240 - DNA, 25 bp, probe
ttgtctttttgcatcagtactttgt

SEQ ID NO: 303241 - DNA, 25 bp, probe
ttggcatcttttgtgctgtatcttt

SEQ ID NO: 303242 - DNA, 25 bp, probe
ttggactatttgtggatactttgtt

SEQ ID NO: 303243 - DNA, 25 bp, probe
ttgtgacttttgtcgaaagctgctt

SEQ ID NO: 303244 - DNA, 25 bp, probe
ttgtactctttgttgatactgctta

SEQ ID NO: 303245 - DNA, 25 bp, probe
ttgtactctataatgtgaactttcc

SEQ ID NO: 303246 - DNA, 25 bp, probe
ttgtttcatttttagcacttctcac

SEQ ID NO: 303247 - DNA, 25 bp, probe
ttgtttcagttgttgacacttgcct

SEQ ID NO: 303248 - DNA, 25 bp, probe
ttggttcctggcttgtagtgtgcct

SEQ ID NO: 303249 - DNA, 25 bp, probe
ttggtttcggcaactcagtgctgca

SEQ ID NO: 303250 - DNA, 25 bp, probe
ttgtttacagcactactctgtgcca

SEQ ID NO: 303251 - DNA, 25 bp, probe
ttgtttggcaagaacactgtgcaca

SEQ ID NO: 303252 - DNA, 25 bp, probe
ttggctttgcaaaacagctgagagc

SEQ ID NO: 303253 - DNA, 25 bp, probe
ttggctttcatcatcacttgggccc

SEQ ID NO: 303254 - DNA, 25 bp, probe
ttggtgggcatcatcagctggggcc

SEQ ID NO: 303255 - DNA, 25 bp, probe
ttggggcccagtgcatggtggccag

SEQ ID NO: 303256 - DNA, 25 bp, probe
ttgggacccagtggcagggcacagg

SEQ ID NO: 303257 - DNA, 25 bp, probe
ttgggacccagtggcagggcacagg

SEQ ID NO: 303258 - DNA, 25 bp, probe
ttgggacctcagttgcaaccacaag

SEQ ID NO: 303259 - DNA, 25 bp, probe
ttgggaactcagttgcatcctacaa

SEQ ID NO: 303260 - DNA, 25 bp, probe
ttgggttcctgaatgcaccataatc

SEQ ID NO: 303261 - DNA, 25 bp, probe
ttgtttctcctagtcaccaagcata

SEQ ID NO: 303262 - DNA, 25 bp, probe
ttgttactgccttttgtcaaataat

SEQ ID NO: 303263 - DNA, 25 bp, probe
ttgttactgccttttgtcaaataat

SEQ ID NO: 303264 - DNA, 25 bp, probe
ttgtctatcctcattttaaaaaatt

SEQ ID NO: 303265 - DNA, 25 bp, probe
ttggcatgtcctgttttgatagtaa

SEQ ID NO: 303266 - DNA, 25 bp, probe
ttgggatactgcttattttatgata

SEQ ID NO: 303267 - DNA, 25 bp, probe
ttgtgtgtacatctgcagttttgca

SEQ ID NO: 303268 - DNA, 25 bp, probe
ttgtgctgtgcaccaggcagatttt

SEQ ID NO: 303269 - DNA, 25 bp, probe
ttgtcgtgcatgtgggatgtatttg

SEQ ID NO: 303270 - DNA, 25 bp, probe
ttgtgttgcttgttggatgaatttg

SEQ ID NO: 303271 - DNA, 25 bp, probe
ttgggctgcttgctgtatgagttat

SEQ ID NO: 303272 - DNA, 25 bp, probe
ttggagttctgctgtatgagatgtt

SEQ ID NO: 303273 - DNA, 25 bp, probe
ttgtggtgacgcctgtcatggtggt

SEQ ID NO: 303274 - DNA, 25 bp, probe
ttgtggtgacgcctgtcatggtggt

SEQ ID NO: 303275 - DNA, 25 bp, probe
ttgtggtacggcagaggcgggggaa

SEQ ID NO: 303276 - DNA, 25 bp, probe
ttgtggtagggaagcagtatgggtg

SEQ ID NO: 303277 - DNA, 25 bp, probe
ttgggaagggcacctgtgctggttg

SEQ ID NO: 303278 - DNA, 25 bp, probe
ttgggtaggtgacctgcttggatct

SEQ ID NO: 303279 - DNA, 25 bp, probe
ttggaaaagtagtccttcagatctt

SEQ ID NO: 303280 - DNA, 25 bp, probe
ttggatctagacagcatctgttcaa

SEQ ID NO: 303281 - DNA, 25 bp, probe
ttggtctgcaacgggctaatccacg

SEQ ID NO: 303282 - DNA, 25 bp, probe
ttggtctgcaacgggctaatccacg

SEQ ID NO: 303283 - DNA, 25 bp, probe
ttgtttgaccgagtctacactcacc

SEQ ID NO: 303284 - DNA, 25 bp, probe
ttgtttgatcccacagcaatccatc
